(19) United States
(12) Patent Application Publication
(10) Pub. No.: US 2003/0148326 A1
(43) Pub. Date: Aug. 7, 2003

(54) Diagnosis of diseases associated with dna transcription

(76) Inventors: Alexander Olek, Berlin (DE); Christian Piepenbrock, Berlin (DE); Kurt Berlin, Stahnsdorf (DE)

Correspondence Address: DAVIDSON, DAVIDSON & KAPPEL, LLC, 485 SEVENTH AVENUE, 14TH FLOOR, NEW YORK, NY, 10018, US

(21) Appl. No.: 10/240,453

(22) PCT Filed: Apr. 6, 2001
(86) PCT No.: PCT/EP01/03973

(30) Foreign Application Priority Data
Apr. 6, 2000 (DE) 10019058.8
Apr. 7, 2000 (DE) 10019173.8
Jun. 30, 2000 (DE) 10032529.7
Sep. 1, 2000 (DE) 10043826.1

(51) Int. Cl. C12Q 1/68; C07H 21/04; C12M 1/34; C07K 14/00

(52) U.S. Cl. 435/6; 435/287.2; 530/350; 536/24.3

(57) ABSTRACT

The present invention relates to the chemically modified genomic sequences of genes associated with DNA transcription to oligonucleotides and/or PNA-oligomers for detecting the cytosine methylation state of genes associated with DNA transcription which are directed against the sequence as well as to a method for ascertaining genetic and/or epigenetic parameters of genes associated with DNA transcription.

[0001] The levels of observation that have been well studied by the methodological developments of recent years in molecular biology, are the genes themselves, the translation of these genes into RNA, and the resulting proteins. The question of which gene is switched on at which point in the course in of the development of an individual, and how the activation and inhibition of specific genes specific cells and tissues are controlled is correlatable to the degree and character of the methylation of the genes or of the genome. In this respect, pathogenic conditions may manifest themselves in a changed methylation pattern of individual genes or of the genome.

[0002] The present invention relates to nucleic acids, oligonucleotides, PNA-oligomers and to a method for the diagnosis and/or therapy of diseases which have a connection with the genetic and/or epigenetic parameters of genes associated with DNA transcription and, in particular, with the methylation status thereof.

### PRIOR ART

[0003] DNA transcription, the process of using genomic DNA as a template for the synthesis of RNA is a complex process. It requires the interaction of various factors, enzymes and sequences. The initiation of DNA transcription requires a complex known as the basal transcription apparatus consisting of RNA polymerase combined with various factors. They form a complex at the startpoint from which transcription proceeds. Examples of such factors include TFIID, TRF1 and TRF2. This is a major control point for gene expression.

[0004] Transcription factors are often classified according to their DNA binding domain. Members of the same group have sequence variations of a specific motif that confer specificity for individual target sites. Common categories include, steroid receptors, zinc finger motifs, helix-turn-helix motifs, helix-loop-helix motifs and leucine zippers.

[0005] The transcription activity is further supplemented by the binding of other components, such as upstream and inducible factors. DNA sequence components of the system include both promoter and enhancer elements. Promoter sequences are located in the vicinity of the transcribed region and enhancer elements are located at a distance from the startpoint. These sequences interact with the factors mentioned above to regulate the transcription of RNA.

[0006] Further control may be exerted by the action of insulator elements, specialised chromatin structures that have hypersensitive sites. They are able to block passage of any activating or inactivating effects from enhancers, silencers, or LCRs.

[0007] A further requirement of DNA transcription is that the DNA be accessible. In most cases the initiation of transcription requires that the DNA be free of nucleosomes. Therefore, a transcription factor, or some other nonhistone protein concerned with the particular function of the site, modifies the properties of a short region of DNA so that nucleosomes are excluded. Several chromatin modification mechanisms are utilised, including histone acetylation and deacetylation activity.

[0008] A further parameter that regulates genomic transcription is methylation. Methylation of CpG islands in the regulatory regions of genes has been shown to be a common method of transcription regulation. Furthermore, aberrant methylation patterns have been associated with a variety of disease phenotypes. For example:

[0009] Head and neck cancer: Sanchez-Cespedes M et al. ‘Gene promoter hypermethylation in tumours and serum of head and neck cancer patients’ Cancer Res. Feb. 15, 2000;60 (4):892-5;

[0010] Hodgkin's disease: Garcia J F et al ‘Loss of p16 protein expression associated with methylation of the p16INK4A gene is a frequent finding in Hodgkin's disease’ Lab invest December 1999;79 (12):1453-9;

[0011] Gastric cancer: Yanagisawa Y et al. ‘Methylation of the hMLH1 promoter in familial gastric cancer with microsatellite instability’ Int J Cancer Jan. 1, 2000; 85 (1):50-3;

[0012] Prader-Willi/Angelman's syndrome: Zeschnigh et al ‘Imprinted segments in the human genome: different DNA methylation patterns in the Prader Willi/Angelman syndrome region as determined by the genomic sequencing method’ Human Mol. Genetics (1997) (6) 3 pp 387-395;

[0013] ICF syndrome: Tuck-Muller et al ‘CMDNA hypomethylation and unusual chromosome instability in cell lines from ICF syndrome patients’ Cytogenet Call Genet 2000; 89(1-2):121-8;

[0014] Dermatofibroma: Chen T C et al ‘Dermatofibroma is a clonal proliferative disease’ J Cutan Pathol January 2000;27 (1):36-9);

[0015] Hypertension: Lee S D et al. ‘Monoclonal endothelial cell proliferation is present in primary but not secondary pulmonary hypertension’ J clin Invest Mar. 1, 1998, 101 (5):927-34;

[0016] Autism: Klauck S M et al. ‘Molecular genetic analysis of the FMR-1 gene in a large collection of autistic patients’ Human Genet August 1997; 100 (2): 224-9;

[0017] Fragile X Syndrome: Hornstra I K et al. ‘High resolution methylation analysis of the FMR1 gene trinucleotide repeat region in fragile X syndrome’ Hum Mol Genet October 1993, 2(10):1659-65;

[0018] Huntigton's disease: Ferluga J et al. ‘possible organ and age related epigenetic factors in Huntington's disease and colorectal carcinoma’ Med hypotheses May 1989;29(1);51-4;

[0019] The proper functioning of the DNA transcription system is essential for the maintenance of cellular functions. Disruptions to the ordered transcription of DNA may impact on a wide variety of disease phenotypes. Mutations in sequences coding for and comprising essential components of the DNA transcription system e.g. zinc finger proteins and enhancer elements have been implicated in a variety of disorders, including cancer:

[0020] Adenosine deaminase deficiency: Ariga T ‘Gene therapy for adenosine deaminase (ADA) deficiency: review of the past, the present and the future’ Nippon Rinsho January 2001;59(1):72-5;

[0021] Cancer: Garte S, Sogawa K ‘Ah receptor gene polymorphisms and human cancer susceptibility’ IARC Sci Publ 1999;(148):149-57;

[0022] Hodgkin's disease: Sandvej K, Andresen B S, Zhou X G, Gregersen N, Hamilton-Dutoit S ‘Analysis of the Epstein-Barr virus (EBV) latent membrane protein 1 (LMP-1) gene and promoter in Hodgkin's disease isolates: selection against EBV variants with mutations in the LMP-1 promoter ATF-1/CREB-1 binding site’ Mol Pathol October 2000;53(5):280-8;

[0023] Ewing's sarcoma family tumors: Aryee D N, Sommergruber W, Muehlbacher K, Dockhorn-Dworniczak B, Zoubek A, Kovar H ‘Variability in gene expression patterns of Ewing tumor cell lines differing in EWS-FLI1 fusion type’ Lab Invest December 2000;80(12):1833-44;

[0024] Colon cancer: Ishiguro T, Nagawa H, Naito M, Tsuruo T Jpn J ‘Inhibitory effect of ATF3 antisense oligonucleotide on ectopic growth of HT29 human colon cancer cells’ Cancer Res August 2000;91(8):833-6;

[0025] Breast cancer: Irminger-Finger I, Siegel B D, Leung W C ‘The functions of breast cancer susceptibility gene 1 (BRCA1) product and its associated proteins’ Biol Chem February 1999; 380(2):117-28;

[0026] Endometrial cancer: Hori M, Takechi K, Arai Y, Yomo H, Itabashi M, Shimazaki J, Inagawa S, Hori M ‘Comparison of macroscopic appearance and estrogen receptor-alpha regulators after gene alteration in human endometrial cancer’ Int J Gynecol Cancer November 2000; 10(6):469-476;

[0027] Wilms' tumor: Inoue K, Sugiyama H, Ogawa H, Nakagawa M, Yamagami T, Miwa H, Kita K, Hiraoka A, Masaoka T, Nasu K, et al ‘WT1 as a new prognostic factor and a new marker for the detection of minimal residual disease in acute leukemia’ Blood Nov. 1, 1994;84(9):3071-9;

[0028] Solid tumors: Kok K, Naylor S L, Buys C H ‘Deletions of the short arm of chromosome 3 in solid tumors and the search for suppressor genes’ Adv Cancer Res 1997;71:27-92;

[0029] Leukemia; Tanaka T, Kurokawa M, Ueki K, Tanaka K, Imai Y, Mitani K, Okazaki K, Sagata N, Yazaki Y, Shibata Y, Kadowaki T, Hirai H ‘The extracellular signal-regulated kinase pathway phosphorylates AML1, an acute myeloid leukemia gene product, and potentially regulates its transactivation ability’Mol Cell Biol July 1996;16(7):3967-79;

[0030] Polyglutamine disorders: Nucifora F C Jr, Sasaki M, Peters M F, Huang H, Cooper J K, Yamada M, Takahashi H, Tsuji S, Troncoso J, Dawson V L, Dawson T M, Ross C A ‘Interference by huntingtin and atrophin-1 with cbp-mediated transcription leading to cellular toxicity’ Science Mar. 23, 2001;291(5512):2423-8;

[0031] Rheumatoid arthritis: Pascual M, Nieto A, Lopez-Nevot M A, Ramal L, Mataran L, Caballero A, Alonso A, Martin J, Zanelli E ‘Rheumatoid arthritis in southern Spain: toward elucidation of a unifying role of the HLA class II region in disease predisposition’ Arthritis Rheum February 2001;44(2):307-14;

[0032] Neurodegenerative disorders: Mattila K M, Axelman K, Rinne J O, Blomberg M, Lehtimaki T, Laippala P, Roytta M, Viitanen M, Wahlund L, Winblad B, Lannfelt L ‘Interaction between estrogen receptor 1 and the epsilon4 allele of apolipoprotein E increases the risk of familial Alzheimer's disease in women’ Neurosci Lett Mar. 17, 2000;282(1-2):45-8;

[0033] Myelodysplastic syndrome and acute leukemia: Patmasiriwat P, Fraizer G, Kantarjian H, Saunders G F ‘WT1 and GATA1 expression in myelodysplastic syndrome and acute leukemia’ Leukemia June 1999;13(6):891-900;

[0034] HDR syndrome: Van Esch H, Groenen P, Nesbit M A, Schuffenhauer S, Lichtner P, Vanderlinden G, Harding B, Beetz R, Bilous R W, Holdaway I, Shaw N J, Fryns J P, Van de Ven W, Thakker R V, Devriendt K ‘GATA3 haplo-insufficiency causes human HDR syndrome’ Nature Jul. 27, 2000;406(6794):419-22;

[0035] Congenital heart disease: Pehlivan T, Pober B R, Brueckner M, Garrett S, Slaugh R, Van Rheeden R, Wilson D B, Watson M S, Hing A V‘GATA4 haploinsufficiency in patients with interstitial deletion of chromosome region 8p23.1 and congenital heart disease’ Am J Med Genet Mar. 19, 1999;83(3):201-6;

[0036] Angiogenesis and erythropoiesis: Krieg M, Haas R, Brauch H, Acker T, Flamme I, Plate K H ‘Up-regulation of hypoxia-inducible factors HIF-1alpha and HIF-2alpha under normoxic conditions in renal carcinoma cells by von Hippel-Lindau tumor suppressor gene loss of function Oncogene Nov. 16, 2000;19(48):5435-43;

[0037] Hypertension: Morse J H, Barst R J, Fotino M, Zhang Y, Flaster E, Fritzler M J ‘Primary pulmonary hypertension: immunogenetic response to high-mobility group(HMG) proteins and histone’ Clin Exp Immunol November 1996;106(2):389-95;

[0038] Myocardial infarction: Hegele R A, Huang L S, Herbert P N, Blum C B, Buring J E, Hennekens C H, Breslow J L ‘Apolipoprotein B-gene DNA polymorphisms associated with myocardial infarction.’ N Engl J Med Dec. 11, 1986;315(24):1509-15;

[0039] Early onset pauciarticular chronic arthritis: Epplen C, Rumpf H, Albert E, Haas P, Truckenbrodt H, Epplen J T ‘Immunoprinting excludes many potential susceptibility genes as predisposing to early onset pauciarticular juvenile chronic arthritis except HLA class II and TNF’ Eur J Immunogenet August 1995;22(4):311-22;

[0040] AIDS-related non-Hodgkin lymphomas and Hodgkin lymphomas arising in HIV+ patients: Carbone A, Gloghini A, Larocca L M, Capello D, Pierconti F, Canzonieri V, Tirelli U, Dalla-Favera R,Gaidano G ‘Expression profile of MUM1/IRF4, BCL-6, and CD138/syndecan-1 defines novel histogenetic subsets of human immunodeficiency virus-related lymphomas’ Blood Feb. 1, 2001;97(3):744-51;

[0041] Multiple endocrine neoplasia: Calender A ‘Molecular genetics of neuroendocrine tumors’ Digestion 2000;62 Suppl 1:3-18;

[0042] Myelodysplastic syndrome and acute myeloid leukemia: Xie J, Briggs J A, Morris S W, Olson M O, Kinney M C, Briggs R C ‘MNDA binds NPM/B23 and the NPM-MLF1 chimera generated by the t(3;5) associated with myelodysplastic syndrome and acute myeloid leukemia’ Exp Hematol October 1997;25(11):111-7;

[0043] Niemann-Pick type C2 disease: Naureckiene S, Sleat D E, Lackland H, Fensom A, Vanier M T, Wattiaux R, Jadot M, Lobel P ‘Identification of HE1 as the second gene of Niemann-Pick C disease’ Science Dec. 22, 2000;290(5500):2298-301;

[0044] Waardenburg syndrome: Bondurand N, Pingault V, Goerich D E, Lemort N, Sock E, Caignec C L, Wegner M, Goossens M ‘Interaction among SOX10, PAX3 and MITF, three genes altered in Waardenburg syndrome’ Hum Mol Genet Aug. 12, 2000;9(13):1907-17;

[0045] Neurological disorders: Geisbrecht B V, Collins C S, Reuber B E, Gould S J ‘Disruption of a PEX1-PEX6 interaction is the most common cause of the neurologic disorders Zellweger syndrome, neonatal adrenoleukodystrophy, and infantile Refsum disease’ Proc Natl Acad Sci USA Jul. 21, 1998;95(15):8630-5;

[0046] Rieger syndrome: Hjalt T, Amendt B, Murray J ‘PITX2 Regulates Procollagen Lysyl Hydroxylase (PLOD) Gene Expression. Implications for the pathology of rieger syndrome’ J Cell Biol Feb. 5, 2001;152(3):545-52;

[0047] Psoriasis vulgaris: Oka A, Tamiya G, Tomizawa M, Ota M, Katsuyama Y, Makino S, Shiina T, Yoshitome M, Ezuka M, Sasao Y, Iwashita K, Kawakubo Y, Sugai J, Ozawa A, Ohkido M, Kimura M, Bahram S, Inoko H ‘Association analysis using refined microsatellite markers localizes a susceptibility locus for psoriasis vulgaris within a 111 kb segment telomeric to the HLA-C gene’ Hum Mol Genet November 1999;8(12):2165-70;

[0048] Developmental disorders: Dattani M T, Robinson I C ‘The molecular basis for developmental disorders of the pituitary gland in man’ Clin Genet May 2000;57(5):337-46;

[0049] Tuberculosis: Selvaraj P, Narayanan P R, Reetha A M ‘Association of vitamin D receptor genotypes with the susceptibility to pulmonary tuberculosis in female patients & resistance in female contacts’ Indian J Med Res May 2000;111:172-9;

[0050] Werner syndrome: Kitao S, Lindor N M, Shiratori M, Furuichi Y, Shimamoto A ‘Rothmund-thomson syndrome responsible gene, RECQL4: genomic structure and products’ Genomics Nov. 1, 1999;61(3):268-76;

[0051] Immunological disorders: Puglatti et. al. ‘The genes for MHC class II regulatory factors RFX1 and RFX2 are located on the short arm of chromosome 19’ Genomics August 1992; 13(4):1307-10;

[0052] Hematological disorders: Elbein S C, Teng K, Eddings K, Hargrove D, Scroggin E ‘Molecular scanning analysis of hepatocyte nuclear factor 1alpha (TCF1) gene in typical familial type 2 diabetes in African Americans’ Metabolism February 2000;49(2):280-4;

[0053] Sezary syndrome: Showe L C, Fox F E, Williams D, Au K, Niu Z, Rook A H ‘Depressed IL-12-mediated signal transduction in T cells from patients with Sezary syndrome is associated with the absence of IL-12 receptor beta 2 mRNA and highly reduced levels of STAT4’ J Immunol Oct. 1, 1999;163(7):4073-9;

[0054] Viral infection: Yoshida M ‘HTLV-1 oncoprotein Tax deregulates transcription of cellular genes through multiple mechanisms’ J Cancer Res Clin Oncol 1995;121(9-10):521-8;

[0055] The large number of components involved in DNA transcription provide novel targets for therapies and diagnosis for diseases. In particular this may be relevant to diseases where current therapies may have unwanted side effects or fail to provide effective treatment. For cancer patients such methods constitute a considerable advantage over conventional methods such as chemotherapy, which with their massive side effects, sometimes result in unacceptable morbidity or lead up to the death of the patient. In practice, the unwanted side effects associated with cancer therapies frequently limit the treatment which could help a patient.

[0056] A global analysis of the status of DNA transcription mechanisms would provide a basis for the development of appropriate and specific therapies for diseases associated with DNA replication. The current state of the art is such that the analysis may be carried out in a gene specific manner based on the results of gene expression, e.g. DNA micro array analysis of mRNA expression or proteomic analysis. The next step would then be to look at the causal factors involved at earlier stages in the regulatory mechanisms controlling DNA transcription. DNA methylation provides a novel level of information at which to analyse the genome.

[0057] 5-methylcytosine is the most frequent covalent base modification in the DNA of eukaryotic cells. It plays a role, for example, in the regulation of the transcription, in genetic imprinting, and in tumorigenesis. Therefore, the identification of 5-methylcytosine as a component of genetic information is of considerable interest. However, 5-methylcytosine positions cannot be identified by sequencing since 5-methylcytosine has the same base pairing behavior as cytosine. Moreover, the epigenetic information carried by 5-methylcytosine is completely lost during PCR amplification.

[0058] A relatively new and currently the most frequently used method for analyzing DNA for 5-methylcytosine is based upon the specific reaction of bisulfite with cytosine which, upon subsequent alkaline hydrolysis, is converted to uracil which corresponds to thymidine in its base pairing behavior. However, 5-methylcytosine remains unmodified under these conditions. Consequently, the original DNA is converted in such a manner that methylcytosine, which originally could not be distinguished from cytosine by its hybridization behavior, can now be detected as the only remaining cytosine using “normal” molecular biological techniques, for example, by amplification and hybridization or sequencing. All of these techniques are based on base pairing which can now be fully exploited. In terms of sensitivity, the prior art is defined by a method which encloses the DNA to be analyzed in an agarose matrix, thus preventing the diffusion and renaturation of the DNA (bisulfite only reacts with single-stranded DNA), and which replaces all precipitation and purification steps with fast dialysis (Olek A, Oswald J, Walter J. A modified and improved method for bisulphite based cytosine methylation analysis. Nucleic Acids Res. Dec. 15, 1996;24(24):5064-6). Using this method, it is possible to analyze individual cells, which illustrates the potential of the method. However, currently only individual regions of a length of up to approximately 3000 base pairs are analyzed, a global analysis of cells for thousands of possible methylation events is not possible. However, this method cannot reliably analyze very small fragments from small sample quantities either. These are lost through the matrix in spite of the diffusion protection.

[0059] An overview of the further known methods of detecting 5-methylcytosine may be gathered from the following review article: Rein, T., DePamphilis, M. L., Zorbas, H., Nucleic Acids Res. 1998, 26, 2255.

[0060] To date, barring few exceptions (e.g., Zeschnigk M, Lich C, Buiting K, Doerfler W, Horsthemke B. A single-tube PCR test for the diagnosis of Angelman and Prader-Willi syndrome based on allelic methylation differences at the SNRPN locus. Eur J Hum Genet. March-April 1997; 5(2):94-8) the bisulfite technique is only used in research. Always, however, short, specific fragments of a known gene are amplified subsequent to a bisulfite treatment and either completely sequenced (Olek A, Walter J. The pre-implantation ontogeny of the H19 methylation imprint. Nat Genet. November 1997;17(3):275-6) or individual cytosine positions are detected by a primer extension reaction (Gonzalgo M L, Jones P A. Rapid quantitation of methylation differences at specific sites using methylation-sensitive single nucleotide primer extension (Ms-SNuPE). Nucleic Acids Res. Jun. 15, 1997;25(12):252.9-31, WO 95/00669) or by enzymatic digestion (Xiong Z, Laird P W. COBRA: a sensitive and quantitative DNA methylation assay. Nucleic Acids Res. Jun. 15, 1997;25(12):2532-4). In addition, detection by hybridization has also been described (Olek et al., WO 99/28498).

[0061] Further publications dealing with the use of the bisulfite technique for methylation detection in individual genes are: Grigg G, Clark S. Sequencing 5-methylcytosine residues in genomic DNA. Bioessays. June 1994;16(6):431-6, 431; Zeschnigk M, Schmitz B, Dittrich B, Buiting K, Horsthemke B, Doerfler W. Imprinted segments in the human genome: different DNA methylation patterns in the Prader-Willi/Angelman syndrome region as determined by the genomic sequencing method. Hum Mol Genet. March 1997;6(3):387-95; Feil R, Charlton J, Bird A P, Walter J, Reik W. Methylation analysis on individual chromosomes: improved protocol for bisulphite genomic sequencing. Nucleic Acids Res. Feb. 25, 1994;22(4):695-6; Martin V, Ribieras S, Song-Wang X, Rio M C, Dante R. Genomic sequencing indicates a correlation between DNA hypomethylation in the 5′ region of the pS2 gene and its expression in human breast cancer cell lines. Gene. May 19, 1995;157(1-2):261-4; WO 97/46705, WO 95/15373 and WO 97/45560.

[0062] An overview of the Prior Art in oligomer array manufacturing can be gathered from a special edition of Nature Genetics (Nature Genetics Supplement, Volume 21, January 1999), published in January 1999, and from the literature cited therein.

[0063] Fluorescently labeled probes are often used for the scanning of immobilized DNA arrays. The simple attachment of Cy3 and Cy5 dyes to the 5′-OH of the specific probe are particularly suitable for fluorescence labels. The detection of the fluorescence of the hybridized probes may be carried out, for example via a confocal microscope. Cy3 and Cy5 dyes, besides many others, are commercially available.

[0064] Matrix Assisted Laser Desorption Ionization Mass Spectrometry (MALDI-TOF) is a very efficient development for the analysis of biomolecules (Karas M, Hillenkamp F. Laser desorption ionization of proteins with molecular masses exceeding 10,000 daltons. Anal Chem. Oct. 15, 1998;60(20):2299-301). An analyte is embedded in a light-absorbing matrix. The matrix is evaporated by a short laser pulse thus transporting the analyte molecule into the vapor phase in an unfragmented manner. The analyte is ionized by collisions with matrix molecules. An applied voltage accelerates the ions into a field-free flight tube. Due to their different masses, the ions are accelerated at different rates. Smaller ions reach the detector sooner than bigger ones.

[0065] MALDI-TOF spectrometry is excellently suited to the analysis of peptides and proteins. The analysis of nucleic acids is somewhat more difficult (Gut I G, Beck S. DNA and Matrix Assisted Laser Desorption Ionization Mass Spectrometry. Current Innovations and Future Trends. 1995, 1; 350-57). The sensitivity to nucleic acids is approximately 100 times worse than to peptides and decreases disproportionally with increasing fragment size. For nucleic acids having a multiply negatively charged backbone, the ionization process via the matrix is considerably less efficient. In MALDI-TOF spectrometry, the selection of the matrix plays an eminently important role. For the desorption of peptides, several very efficient matrixes have been found which produce a very fine crystallization. There are now several responsive matrixes for DNA, however, the difference in sensitivity has not been reduced. The difference in sensitivity can be reduced by chemically modifying the DNA in such a manner that it becomes more similar to a peptide. Phosphorothioate nucleic acids in which the usual phosphates of the backbone are substituted with thiophosphates can be converted into a charge-neutral DNA using simple alkylation chemistry (Gut I G, Beck S. A procedure for selective DNA alkylation and detection by mass spectrometry. Nucleic Acids Res. Apr. 25, 1995;23(8):1367-73). The coupling of a charge tag to this modified DNA results in an increase in sensitivity to the same level as that found for peptides. A further advantage of charge tagging is the increased stability of the analysis against impurities which make the detection of unmodified substrates considerably more difficult.

[0066] Genomic DNA is obtained from DNA of cell, tissue or other test samples using standard methods. This standard methodology is found in references such as Fritsch and Maniatis eds., Molecular Cloning: A Laboratory Manual, 1989.

[0067] Description

[0068] The object of the present invention is to provide the chemically modified DNA of genes associated with DNA transcription, as well as oligonucleotides and/or PNA-oligomers for detecting cytosine methylations, as well as a method which is particularly suitable for the diagnosis and/or therapy of genetic and epigenetic parameters of genes associated with DNA transcription. The present invention is based on the discovery that genetic and epigenetic parameters and, in particular, the cytosine methylation pattern of genes associated with DNA transcription are particularly suitable for the diagnosis and/or therapy of diseases associated with DNA transcription.

[0069] This objective is achieved according to the present invention using a nucleic acid containing a sequence of at least 18 bases in length of the chemically pretreated DNA of genes associated with DNA transcription according to one of Seq. ID No.1 through Seq. ID No.346 and sequences complementary thereto and/or a chemically pretreated DNA of genes according to the sequences of genes according to table 1 and sequences complementary thereto. In the table, after the listed gene designations, the respective data bank numbers (accession numbers) are specified which define the appertaining gene sequences as unique. GenBank was used as the underlying data bank, which is located at the National Institute of Health at internet address http://www.ncbi.nlm.nih.gov.

[0070] The chemically modified nucleic acid could heretofore not be connected with the ascertainment of genetic and epigenetic parameters.

[0071] The object of the present invention is further achieved by an oligonucleotide or oligomer for detecting the cytosine methylation state in chemically pretreated DNA, containing at least one base sequence having a length of at least 13 nucleotides which hybridizes to a chemically pretreated DNA of genes associated with DNA transcription according to Seq. ID No.1 through Seq. ID No.346 and sequences complementary thereto and/or a chemically pretreated DNA of genes according to the sequences of genes according to table 1 and sequences complementary thereto. The oligomer probes according to the present invention constitute important and effective tools which, for the first time, make it possible to ascertain the genetic and epigenetic parameters of genes associated with DNA transcription. The base sequence of the oligomers preferably contain at least one CpG dinucleotide. The probes may also exist in the form of a PNA (peptide nucleic acid) which has particularly preferred pairing properties. Particularly referred are oligonucleotides according to the present invention in which the cytosine of the CpG dinucleotide is the 5^{th}-9^{th} nucleotide from the 5′-end of the 13-mer; in the case of PNA-oligomers, it is preferred for the cytosine of the CpG dinucleotide to be the 4^{th}-6^{th} nucleotide from the 5′-end of the 9-mer.

[0072] The oligomers according to the present invention are normally used in so called “sets” which contain at least one oligomer for each of the CpG dinucleotides of the sequences of Seq. ID No.1 through Seq. ID No.346 and sequences complementary thereto and/or a chemically pretreated DNA of genes according to the sequences of genes according to table 1 and sequences complementary thereto. Preferred is a set which contains at least one oligomer for each of the CpG dinucleotides from one of Seq. ID No.1 through Seq. ID No.346 and sequences complementary thereto and/or a chemically pretreated DNA of genes according to the sequences of genes according to table 1 and sequences complementary thereto.

[0073] Moreover, the present invention makes available a set of at least two oligonucleotides which can be used as so-called “primer oligonucleotides” for amplifying DNA sequences of one of Seq. ID No.1 through Seq. ID No.346 and sequences complementary thereto and/or a chemically pretreated DNA of genes according to the sequences of genes according to table 1 and sequences complementary thereto, or segments thereof.

[0074] In the case of the sets of oligonucleotides according to the present invention, it is preferred that at least one oligonucleotide is bound to a solid phase.

[0075] The present invention moreover relates to a set of at least 10 n (oligonucleotides and/or PNA-oligomers) used for detecting the cytosine methylation state in chemically pretreated genomic DNA (Seq. ID No.1 through Seq. ID No.346 and sequences complementary thereto and/or a chemically pretreated DNA of genes according to the sequences of genes according to table 1 and sequences complementary thereto). These probes enable diagnosis and/or therapy of genetic and epigenetic parameters of genes associated with DNA transcription. The set of oligomers may also be used for detecting single nucleotide polymorphisms (SNPs) in the chemically pretreated DNA of genes associated with DNA transcription according to one of Seq. ID No.1 through Seq. ID No.346 and sequences complementary thereto and/or a chemically pretreated DNA of genes according to the sequences of genes according to table 1 and sequences complementary thereto.

[0076] According to the present invention, it is preferred that an arrangement of different oligonucleotides- and/or PNA-oligomers (a so-called “array”) made available by the present invention is present in a manner that it is likewise bound to a solid phase. This array of different oligonucleotide- and/or PNA-oligomer sequences can be characterized in that it is arranged on the solid phase in the form of a rectangular or hexagonal lattice. The solid phase surface is preferably composed of silicon, glass, polystyrene, aluminium, steel, iron, copper, nickel, silver, or gold. However, nitrocellulose as well as plastics such as nylon which can exist in the form of pellets or also as resin matrices are possible as well.

[0077] Therefore, a further subject matter of the present invention is a method for manufacturing an array fixed to a carrier material for analysis in connection with diseases associated with DNA transcription in which method at least one oligomer according to the present invention is coupled to a solid phase. Methods for manufacturing such arrays are known, for example, from U.S. Pat. No. 5,744,305 by means of solid-phase chemistry and photolabile protecting groups.

[0078] A further subject matter of the present invention relates to a DNA chip for the analysis of diseases associated with DNA transcription which contains at least one nucleic acid according to the present invention. DNA chips are known, for example, for U.S. Pat. No. 5,837,832.

[0079] Moreover, a subject matter of the present invention is a kit which may be composed, for example, of a bisulfite-containing reagent, a set of primer oligonucleotides containing at least two oligonucleotides whose sequences in each case correspond or are complementary to an 18 base long segment of the base sequences specified in the appendix (Seq. ID No.1 through Seq. ID No.346 and sequences complementary thereto and/or a chemically pretreated DNA of genes according to the sequences of genes according to table 1 and sequences complementary thereto), oligonucleotides and/or PNA-oligomers as well as instructions for carrying out and evaluating the described method. However, a kit along the lines of the present invention can also contain only part of the aforementioned components.

[0080] The present invention also makes available a method for ascertaining genetic and/or epigenetic parameters of genes associated with the cycle cell by analyzing cytosine methylations and single nucleotide polymorphisms, including the following steps:

[0081] In the first step of the method, a genomic DNA sample is chemically treated in such a manner that cytosine bases which are unmethylated at the 5′-position are converted to uracil, thymine, or another base which is dissimilar to cytosine in terms of hybridization behavior. This will be understood as ‘chemical pretreatment’ hereinafter.

[0082] The genomic DNA to be analyzed is preferably obtained form usual sources of DNA such as cells or cell components, for example, cell lines, biopsies, blood, sputum, stool, urine, cerebral-spinal fluid, tissue embedded in paraffin such as tissue from eyes, intestine, kidney, brain, heart, prostate, lung, breast or liver, histologic object slides, or combinations thereof.

[0083] The above described treatment of genomic DNA is preferably carried out with bisulfite (hydrogen sulfite, disulfite) and subsequent alkaline hydrolysis which results in a conversion of non-methylated cytosine nucleobases to uracil or to another base which is dissimilar to cytosine in terms of base pairing behavior.

[0084] Fragments of the chemically pretreated DNA are amplified, using sets of primer oligonucleotides according to the present invention, and a, preferably heat-stable polymerase. Because of statistical and practical considerations, preferably more than ten different fragments having a length of 100-2000 base pairs are amplified. The amplification of several DNA segments can be carried out simultaneously in one and the same reaction vessel. Usually, the amplification is carried out by means of a polymerase chain reaction (PCR).

[0085] In a preferred embodiment of the method, the set of primer oligonucleotides includes at least two olignonucleotides whose sequences are each reverse complementary or identical to an at least 18 base-pair long segment of the base sequences specified in the appendix (Seq. ID No.1 through Seq. ID No.346 and sequences complementary thereto and/or a chemically pretreated DNA of genes according to the sequences of genes according to table 1 and sequences complementary thereto). The primer oligonucleotides are preferably characterized in that they do not contain any CpG dinucleotides.

[0086] According to the present invention, it is preferred that at least one primer oligonucleotide is bonded to a solid phase during amplification. The different oligonucleotide and/or PNA-oligomer sequences can be arranged on a plane solid phase in the form of a rectangular or hexagonal lattice, the solid phase surface preferably being composed of silicon, glass, polystyrene, aluminium, steel, iron, copper, nickel, silver, or gold, it being possible for other materials such as nitrocellulose or plastics to be used as well.

[0087] The fragments obtained by means of the amplification can carry a directly or indirectly detectable label. Preferred are labels in the form of fluorescence labels, radionuclides, or detachable molecule fragments having a typical mass which can be detected in a mass spectrometer, it being preferred that the fragments that are produced have a single positive or negative net charge for better detectability in the mass spectrometer. The detection may be carried out and visualized by means of matrix assisted laser desorption/ionization mass spectrometry (MALDI) or using electron spray mass spectrometry (ESI).

[0088] The amplificates obtained in the second step of the method are subsequently hybridized to an array or a set of oligonucleotides and/or PNA probes. In this context, the hybridization takes place in the manner described in the following. The set of probes used during the hybridization is preferably composed of at least 10 oligonucleotides or PNA-oligomers. In the process, the amplificates serve as probes which hybridize to oligonucleotides previously bonded to a solid phase. The non-hybridized fragments are subsequently removed. Said oligonucleotides contain at least one base sequence having a length of 13 nucleotides which is reverse complementary or identical to a segment of the base sequences specified in the appendix, the segment containing at least one CpG dinucleotide. The cytosine of the CpG dinucleotide is the 5^{th} to 9^{th} nucleotide from the 5′-end of the 13-mer. One oligonucleotide exists for each CpG dinucleotide. Said PNA-oligomers contain at least one base sequence having a length of 9 nucleotides which is reverse complementary or identical to a segment of the base sequences specified in the appendix, the segment containing at least one CpG dinucleotide. The cytosine of the CpG dinucleotide is the 4^{th} to 6^{th} nucleotide seen from the 5′-end of the 9-mer. One oligonucleotide exists for each CpG dinucleotide.

[0089] In the fourth step of the method, the non-hybridized amplificates are removed.

[0090] In the final step of the method, the hybridized amplificates are detected. In this context, it is preferred that labels attached to the amplificates are identifiable at each position of the solid phase at which an oligonucleotide sequence is located.

[0091] According to the present invention, it is preferred that the labels of the amplificates are fluorescence labels, radionuclides, or detachable molecule fragments having a typical mass which can be detected in a mass spectrometer. The mass spectrometer is preferred for the detection of the amplificates, fragments of the amplificates or of probes which are complementary to the amplificates, it being possible for the detection to be carried out and visualized by means of matrix assisted laser desorption/ionization mass spectrometry (MALDI) or using electron spray mass spectrometry (ESI).

[0092] The produced fragments may have a single positive or negative net charge for better detectability in the mass spectrometer. The aforementioned method is preferably used for ascertaining genetic and/or epigenetic parameters of genes associated with DNA transcription.

[0093] The oligomers according to the present invention or arrays thereof as well as a kit according to the present invention are intended to be used for the diagnosis and/or therapy of diseases associated with DNA transcription by analyzing methylation patterns of genes associated with DNA transcription. According to the present invention, the method is preferably used for the diagnosis and/or therapy of important genetic and/or epigenetic parameters within genes associated with DNA transcription.

[0094] The method according to the present invention is used, for example, for the diagnosis and/or therapy of diseases.

[0095] The nucleic acids according to the present invention of Seq. ID No.1 through Seq. ID No.346 and sequences complementary thereto and/or a chemically pretreated DNA of genes according to the sequences of genes according to table 1 and sequences complementary thereto can be used for the diagnosis and/or therapy of genetic and/or epigenetic parameters of genes associated with DNA transcription.

[0096] The present invention moreover relates to a method for manufacturing a diagnostic agent and/or therapeutic agent for the diagnosis and/or therapy of diseases associated with DNA transcription by analyzing methylation patterns of genes associated with DNA transcription, the diagnostic agent and/or therapeutic agent being characterized in that at least one nucleic acid according to the present invention is used for manufacturing it, possibly together with suitable additives and auxiliary agents.

[0097] A further subject matter of the present invention relates to a diagnostic agent and/or therapeutic agent for diseases associated with DNA transcription by analyzing methylation patterns of genes associated with DNA transcription, the diagnostic agent and/or therapeutic agent containing at least one nucleic acid according to the present invention, possibly together with suitable additives and auxiliary agents.

[0098] The present invention moreover relates to the diagnosis and/or prognosis of events which are disadvantageous to patients or individuals in which important genetic and/or epigenetic parameters within genes associated with DNA transcription said parameters obtained by means of the present invention may be compared to another set of genetic and/or epigenetic parameters, the differences serving as the basis for a diagnosis and/or prognosis of events which are disadvantageous to patients or individuals.

[0099] In the context of the present invention the term “hybridization” is to be understood as a bond of an oligonucleotide to a completely complementary sequence along the lines of the Watson-Crick base pairings in the sample DNA, forming a duplex structure. To be understood by “stringent hybridization conditions” are those conditions in which a hybridization is carried out at 60° C. in 2.5×SSC buffer, followed by several washing steps at 37° C. in a low buffer concentration, and remains stable.

[0100] The term “functional variants” denotes all DNA sequences which are complementary to a DNA sequence, and which hybridize to the reference sequence under stringent conditions and have an activity similar to the corresponding polypeptide according to the present invention.

[0101] In the context of the present invention, “genetic parameters” are mutations and polymorphisms of genes associated with DNA transcription and sequences further required for their regulation. To be designated as mutations are, in particular, insertions, deletions, point mutations, inversions and polymorphisms and, particularly preferred, SNPs (single nucleotide polymorphisms).

[0102] In the context of the present invention, “epigenetic parameters” are, in particular, cytosine methylations and further chemical modifications of DNA bases of genes associated with DNA transcription and sequences further required for their regulation. Further epigenetic parameters include, for example, the acetylation of histones which, however, cannot be directly analyzed using the described method but which, in turn, correlates with the DNA methylation.

[0103] In the following, the present invention will be explained in greater detail on the basis of the sequences and examples with respect to the accompanying FIGURE without being limited thereto.

[0104] FIG. 1

[0105] FIG. 1 shows the hybridisation of fluorescent labelled amplificates to a surface bound olignonucleotide. Sample I being from a pilocytic astrocytoma tumor sample and sample II being form an oligodenrogliome grade II tumor sample. Flourescence at a spot shows hybridisation of the amplificate to the olignonucleotide. Hybridisation to a CG olgnonucleotide denotes methylation at the cytosine position being analysed, gybridisation to a TG olignonucleotide denates no methylation at the cytosine position being analysed.

[0106] Seq. ID No. 1 Through Seq. ID No. 346

[0107] Sequences having odd sequence numbers (e.g., Seq. ID No. 1, 3, 5, . . . ) exhibit in each case sequences of the chemically pretreated genomic DNAs of different genes associated with DNA transcription. Sequences having even sequence numbers (e.g., Seq. ID No. 2, 4, 6, . . . ) exhibit in each case the sequences of the chemically pretreated genomic DNAs of genes associated with DNA transcription which are complementary to the preceeding sequences (e.g., the complementary sequence to Seq. ID No.1 is Seq. ID No.2, the complementary sequence to Seq. ID No.3 is Seq. ID No.4, etc.)

[0108] Seq. ID No. 347 Through Seq. ID No. 350

[0109] Seq. ID No. 347 through Seq. ID No. 350 show sequences of oligonucleotides used in Example 1.

[0110] The following example relates to a fragment of a gene associated with DNA transcription, in this case, CFOS in which a specific CG-position is analyzed for its methylation status.

### EXAMPLE 1

### Methylation Analysis in the Gene CFOS Associated with DNA Transcription

[0111] The following example relates to a fragment of the gene CFOS in which a specific CG-position is to be analyzed for methylation.

[0112] In the first step, a genomic sequence is treated using bisulfite (hydrogen sulfite, disulfite) in such a manner that all cytosines which are not methylated at the 5-position of the base are modified in such a manner that a different base is substituted with regard to the base pairing behavior while the cytosines methylated at the 5-position remain unchanged.

[0113] If bisulfite solution is used for the reaction, then an addition takes place at the non-methylated cytosine bases. Moreover, a denaturating reagent or solvent as well as a radical interceptor must be present. A subsequent alkaline hydrolysis then gives rise to the conversion of non-methylated cytosine nucleobases to uracil. The chemically converted DNA (sequence ID 345) is then used for the detection of methylated cytosines. In the second method step, the treated DNA sample is diluted with water or an aqueous solution. Preferably, the DNA is subsequently desulfonated (10-30 min, 90-100° C.) at an alkaline pH value. In the third step of the method, the DNA sample is amplified in a polymerase chain reaction, preferably using a heat-resistant DNA polymerase. In the present case, cytosines of the gene CFOS are analyzed. To this end, a defined fragment having a length of 951 bp is amplified with the specific primer oligonucleotides TTTTGAGTTTTAGAATTGTT (Sequence ID No. 347) and AAAAACCCCCTACTCATCTA (Sequence ID No. 348). This amplificate serves as a sample which hybridizes to an oligonucleotide previously bonded to a solid phase, forming a duplex structure, for example AAAACATTCGCACCTAAT (Sequence ID No. 349), the cytosine to be detected being located at position 105. of the amplificate. The detection of the hybridization product is based on Cy3 and Cy5 fluorescently labeled primer oligonucleotides which have been used for the amplification. A hybridization reaction of the amplified DNA with the oligonucleotide takes place only if a methylated cytosine was present at this location in the bisulfite-treated DNA. Thus, the methylation status of the specific cytosine to be analyzed is inferred from the hybridization product.

[0114] In order to verify the methylation status of the position, a sample of the amplificate is further hybridized to another oligonucleotide previously bonded to a solid phase. Said oligonucleotide is identical to the oligonucleotide previously used to analyze the methylation status of the sample, with the exception of the position in question. At the position to be analysed said oligonucleotide comprises a thymine base as opposed to a cytosine base i.e AAAACATTCACACCTAAT (Sequence ID No. 350). Therefore, the hybridisation reaction only takes place if an unmethylated cytosine was present at the position to be analysed. The procedure was carried out on cell samples from 2 patients, sample I being from a pilocytic astrocytoma tumor sample and sample II being from an oligodenrogliome grade II tumor sample.

[0115] From the results (FIG. 1) it can be seen that Sample I contained both methylated and unmethylated cells and sample II was unmethylated.

### EXAMPLE 2

### Diagonosis of Diseases Associated with DNA Transcription

[0116] In order to relate the methylation patterns to one of the diseases associated with DNA transcription, it is initially required to analyze the DNA methylation patterns of a group of diseased and of a group of healthy patients. These analyses are carried out, for example, analogously to Example 1. The results obtained in this manner are stored in a database and the CpG dinucleotides which are methylated differently between the two groups are identified. This can be carried out by determining individual CpG methylation rates as can be done, for example, in a relatively imprecise manner, by sequencing or else, in a very precise manner, by a methylation-sensitive “primer extension reaction”. It is also possible for the entire methylation status to be analyzed simultaneously, and for the patterns to be compared, for example, by clustering analyses which can be carried out, for example, by a computer.

[0117] Subsequently, it is possible to allocate the examined patients to a specific therapy group and to treat these patients selectively with an individualized therapy.

[0118] Example 2 can be carried out, for example, for the following diseases: Adenosine deaminase deficiency, Viral infection, Retroviral infection, Sezary syndrome, Hematological disorders, Immunological disorders, Werner syndrome, Tuberculosis, Developmental disorders, Psoriasis, Rieger syndrome, Neurological disorders, Neurodegenerative disorders, Waardenburg syndrome, Niemann-Pick disease, Myelodysplastic syndrome, Myocardial infarction, Hypertension, Angiogenesis, Erythropoiesis, Congenital heart disease, HDR syndrome, Myelodysplastic syndrome, Arthiritis, Polyglutamine disorders, solid tumors and cancer

TABLE 1
Listing of particularly preferred genes of the present
invention associated with DNA transcription

| | Database Entry No. |
|---|---|
| | (Genbank a |
| Gene | http://www.ncbi.nlm.nih.gov) |
| ELF1 | M82882 |
| ETV3 | L16464 |
| ETV4 | D12765 |
| TAF2C2 | Y09321 |
| TCF9 | M29204 |
| ZNF121 | M99593 |
| ZNF131 | U09410 |
| ZNF139 | U09848 |
| ZNF154 | U20648 |
| ZNF169 | U28322 |
| ZNF2 | X60152 |
| ZNF204 | AF033199 |
| ZNF206 | AA206569 |
| ZNF3 | X78926 |
| ZNF37A | X69115 |
| ZNF44 | X16281 |
| ZNF8 | M29581 |
| ZK1 | NM_005815 |
| ADA | NM_000022 |
| ATBF1 | ND_006885 |
| ATF3 | NM_001674 |
| ZNF255 | NM_005774 |
| CBFB | NM_001755 |
| CEBPD | NM_005195 |
| CTPS | NM_001905 |
| DCTD | NM_001921 |
| DR1 | NM_001938 |
| ELF3 | NM_004433 |
| ELK4 | NM_021795 |
| ETV5 | NM_004454 |
| KLF4 | NM_004235 |
| FOXO1A | NM_002015 |
| FLI1 | NM_002017 |
| HHEX | NM_001529 |
| HIVEP1 | NM_002114 |
| HMG2 | NM_002129 |
| ID1 | NM_002165 |
| ID3 | NM_002167 |
| LAF4 | NM_002285 |
| ZNFN 1A1 | NM_006060 |
| LYL1 | NM_005583 |
| MAFG | NM_002359 |
| MAZ | NM_002383 |
| ODC1 | NM_002539 |
| PBX3 | NM_006195 |
| POU2AF1 | NM_006235 |
| POU2F2 | NM_002698 |
| POU3F1 | NM_002699 |
| PROP1 | NM_006261 |
| RARG | NM_000966 |
| RECQL | NM_002907 |
| RXRA | NM_002957 |
| SP100 | NM_003113 |
| ZFP93 | NM_004234 |
| MKRN3 | NM_005664 |
| ZF133 | NM_003434 |
| ZNF157 | NM_003446 |
| ZNF173 | NM_003449 |
| ZNF189 | NM_003452 |
| ZNF207 | NM_003457 |
| ZNF262 | NM_005095 |
| ZNF264 | NM_003417 |
| ZNF74 | NM_003426 |
| ZNF91 | NM_003430 |
| POU3F2 | NM_005604 |
| ZNF84 | NM_003428 |
| ERV3 | |
| TCF8 | |

The application's sequence listing, which the Patent Office published only in electronic form, follows.

SEQUENCE LISTING (350 sequences)

SEQ ID NO: 1 - DNA, 10619 bp, Artificial Sequence
  chemically treated genomic DNA (Homo sapiens)
gttttatttgtttaataggaaatttttggtgtggggttttagatattttttttattttattattatatatatatatattagtagttagaattgtgtgtttttttttttttttttttttttttttgatatagagttttggtttgtcgattaggttggagtgtagtggtgtaatttcggtttattgtaatttttgttttttaagattaagggatttttttgttttagttttttgagtagtttggattataggtatgtattattatgtttagttaattgttttgtatttttagtagagatagggttttatcgtgttagttaggttggttttaaatttttgattttgtgattcgtttgttttggttttttaaagtgttgggattataggtacgagttattattttttttttttatttttgattaattttgataaaatataaaattaaattaagataaattaattttgtaaaataaagataaagttggaggttttatattttttgattttaaaatttattatgatgtggcgttggaataaagataaatatatagattaatggaatagaatagagagtttaaaaataaatttttaatatatatggttaaatgattttaataagggtgttaagattatttagtgggaaaaggatagttttttttatagatggtggatttttatatgtagaagaatgtagttggatttatattttatattaaatgtttgttgtgagtttatttatttttttgtgtgtgtggagatagggtcgtgttatgttgtttaggttgatttagaattttttatttagagatattgttaaggtaagtgagggttaagtggatattgagtgattttgtgttttattgagtaaaaataattaaatatgggcgaaggagagtttaatgattttagggataaaatgttattacgggtattttgcgtacgtttgttaggatataggagaagtaattagatattttatttatttttttagaatgtttattaatatgtttagaaaggtggaaaattttatttgttaaagagaaggaaattggaggtatggttaaaagtatttaaggttttttatgaaaaagaaatgaaaattgatattttttttaaaagagaagtaaaatagaaatttagagattttaatgtattcgaaaggttttttttgggtttttattttgtgttttgagtattgtttttaaattaaaggagatttcggtttgtttattggtagtgatgttaagaatttgggagggatatgagtgattatgttgtagatggtaagtagtttaaaaagaaggttttttaattgaaggaaaagtattaagagtagaatgttgtatatttagttaaaggaaagttgatgtggtaaaaatgatgttgttaaggtcgaaaaaggtaagaaaaaaaaataaagcggagaaagatagagaaggtaaggaaaataaaaaatgaagtcgatgataatgataaataaggtggttttatggtagtttttttttttttttttttgtttataaagtatttaatttatttggatatagtttattttttttaaagaaaaaaattgaaatgtaaagttatttaagatttatttgtaaattgtatgatggcgttttttttttgtttttgtattattaataagaattattaagtaattttttagataattttgttttggtggtattttgtatagttattaattttgtttggtatattataggggttataaattagtatgggaattttaaatttaaggtatagtataagttagttatatataaatgtgaagtaatattattaattaaattgttggtttgtgcgaagggagggttaattgtgggatttagttatttatttaataaatattggtgagtgtttgatattgttttaggtattgaggttattgtaataaaatagatataagtttttgtttttatggagtttatattttggtgagggatatagagttattaaaaaggatggtagttgggttatgagaaaggattaaagttaggaagttagaattcggggatggattgaatatgggataaaagagaagagttaagttgattataaagtatttggtttaagtaatgtaaagaatggtgggttattttttgagatgggaagtattagggtagttttggatataaatggagatgtatataagttatttaaattgaaatattgagaaggtagtaggtgatagttggttttttttaggttttagggtaggaatttttaattttttgtgtgtgtgtttaggatttttttggtggtttatgaagttttttttagaataaatattgtggaggaatttattttaatgtaatagtagtttttaggtatattattaggtaaattattttataagttataaaatagaaagttttatagattaaattatgatgtttgaattgtaggtttattgaattagtttaaaattatttatagtaagaattcgatggggtgtatgatatatataggatagggtataggcgaggtagatggattatattattagaatttagaattagggaattttttttttttttttttttttttttttttttgagattgttttattatgttgtttaggttggagtgtaatggcgtgatttcggtttattgtaatttttattttttgggtttaagcgatttttatgttttagtttttcgagtagttgggattataggtacgtattataatgtttagttaatttttgtatttttagtagagacggggttttattatgttgattaggttggttttgaatttttgattttaggtgatttattcgttttagatttttaaagcgttgggattataggtatgagttattgtatttggttaatattgatatgttttttttttttttgtcgtattagtttgttttattgatagagttgaggatgtttaaggcggtttaatagagggtatttggagtaatttatattgtattattagagagatataagtgtaagtatatttagttatagttgtagtttattaattagtttgttgaatagatttgaattttagttgtatttttggggtagagtatatgggtgttaggatgggattataattttattattaatgagtggttatttagggatgatatagttgttaatttagagatggtatgattatgttttttgatttggttattttttaagtaaaatttttatttgttttattatattttttatttattttgtttatttttaaaatattttttttttttttttgagatagggttatattgttatttaggttagagtttagtggtattattatggtttattatagttttaatttttagggtttaggtgatttttttattttagtttttcgagtagatgggattataggtatttgttattatttttagttaatttttgtagagataaggttttgttatgttgtttaggttggttttgaatttttgggtttaagggattcggttattttagttttttaaagtgttaggattataggtatgagttattgtgtttagtttatttttaacgtatttaattggttattaatttttaggattcggtttatgttttataatttttttgtttatttaatatttttgttttttaagttattagttttttttttatggttaatattttttatgagttttatttatttgtttattttttttattttttatattagaattgaatatttttaaataaagtatatttatgttataatttttgaaatgaaaaaaaaaatgtataggattagaaaagaaattaattttaataaattatattttgaagtatagttttatattaaataataagatttaggttaggtgtagtggtttatgtttgtaattttagtaatttgggaagtcgaggtgggaggattgtttgaggttaggggtttaagattagtttgggtaatatggagagattttttatttttttttttatatatatatatatatatatatatatatataaaatatttgatagtaataggtgttgttattattataatttcgagtagtgatgagtttaataatatttcgagttattattaataattgtaaagtaatatgaaaacgtttgtgatgattattgtttataaagttataggtattgttaatatttttggtatttgtagttaaatttataataaaggaaatgttaggttttagttggtattttgtttcgacggtttgtggacggtaggttagaacgttcgtttaagttaggagggtggatttagtattgtagggtttatttcgggttaattaattatattttcgaggcgggggttcggtttttcggatttagttgtttttaggggagagaggatatatttaagagtttggggtcggcgtggtagtatatgtttttgattttagtatttcgggaggttgaggcgtgaagattatttgtagtaggagtttgagattagtttagttaatttggcgagattttgtttttaaaaaaaatttttttttaattagttagttgtggtgagcgtttgtagttttagttattcgggaggttgaggtgggaggatcgttgggtttaggagttttagattgtagtgagttatgatggcggtattgtattttagcgcggtgagatttagttttaaaaataaaagggggaggggttgggggtaaaattagttgtgaaattaagtaagattttttgggatagaataattaaaggggtggcgtcgggttttttaaagagttattagtttagtttaagtttcgtttcggtttttaggtagcggtcgtagagttttattcggtaggcgttcgggaaatttcgtttttcggtcggtagggggcgcgcgtcgtcggtttcgtttcgtggacgcgggtttcgtgggcgttttcgcggttaggtattagtaatttattagggaacggcggtggtcggtgcggcgtgttcggtggcggttttggtcgtttaagagttgcggttgggtgagcgtacgcgaggcggcgaggcggtagcgtgtttttaggtcgtggcgtcgggttttcggagttttggcggtagttaggggaggatggcggagttttcggataagttttatcgagtcgagtacgttaagagcgggcgcgttttttgtaagaaatgtagcgagagtatttttaaggattcgtttcggatggttattatggtgtaggtgcgggttttgtgcgggcggcggggcggggacgcggcgtttcgggttaattgtgttcgggaaggttgggggagggcggttttagggagcgagcgggttcgggttcgggttttcggagcggtatttggggtttatgggttcgcggtcgttttttttttcgagcggttcggtcgattttttcggaaggttttgttgatgttgtaggaaaagttcgggaaataaagtttgtagttggtgttgtttttcgttttgtgaaaacgaggagttttttttttttttttttttgggtggcggtgttttattattgtcgttcgttttaggggttgggggggaattgtatatggtttttttaagttaatttgattttgatttattttgttttggagggtttttgttttatatggatggtggcgattgatatgtgggtttttttttttttttgttaaatttatttttggtagttattttaatacgttatttaaacgtttatttttattttttattttaattaggtagaattatgtagaaaggtgttatttttgtatagtatatttattttgagtttaatttgtgttttaaagtaatattttttttaaattttttagatttatagacgcgtttttttggtgtatttgtagttgtttggtttgagtaagagtggttttaggggggttttttatgtgggttttttgatagattgaatttttttttgaggttttttgagttttttgtgaggtggtgggtttgaaggtttttgttattttttaggggtttttgtttttagtttttagtttgtcgatgtttatttttgtattaataattttggtttttatttgttttgttttttttcgtttttaatatattatttaagtttagtgtttatggttaaggtagtttgattttttttttttttatgagttgtaatgtgttttaggaatgattagatattttttagtggatttttagtatttagtataagggagggcgatatttatcgagtggatatttaagtgttaggtgtattttcgttattttattttataatatgtttgttattttggtgttttcggggtatatttaagttagtacgtggtatatagtgtttatttggtaggtattttttaagttttaagtattttgttaggttttaaggatatagaatttatttttgggaatttttagtttggttaaacgggaaatgattggtaaataaatattatcgtaagagaggatggatgttatttgatggagttgtgttttaggtattgtgtgtttaggagttcgagatgatttagttaagggtggaagtttgattaggagtcgttaatttatagaagtggagtagaaagatgagaatagggaagtagatagggtttataatttgaagagttttgttgtttattaaggaatttagaatttattttgaatatataaggtagtttgttatgaagtttttatttttggtgtaggagtttttattttagggtttgtgggatggtaggtagaaggtaagaggtttatgagtttagataagaaaaaattgatatttttatttttattaatttttagataaaattattttttttaattataaatgtaagtagtaaagtaaaggtatattagtagtttttattttttttttattagtgataattatagatatttttatattattttatagttggaagttttttaaaatataatttatttttattgttataaaaattatagttattagaggttgtattagattttgttatttaatgtttaaaagtttacgggttattgtatttaaattattttttaaatgttttgataattattttagtgtttttttttcgagtttttttgtttgttttgttttttgagatggggttttattatgttgtttaggttggttttaaatttttgagtttaagcgatttatgtatttcggttttataaagtgttagggttataggtatgagttatcgtgattggttatttgcgagtttttttattacgtatttttaaatgttattttgagaaagggatatttaggcgttttaataggtgggtagagtatcgtgttttggtggaaagataaataaaatttaagtttagattgtgttgaggttagaataatatcgttgtggaggaagttagaggaggtttagttgtgggggaggtcggatggaggaaattgaatttgattaagtttagtattttggggtcgggtttggtggcgtatgtttgtaattttagtattttgggaggttggggtgggtagattatttaagtttagtagtttgagattagtttggttaatatggtgaaatttgtttttataaaaaaatgtaatgattagcgggtcgtggtggtgcgtgtttgttaaggtttagttatttcggaggttgaagttggaagattgtttgagtttgggaggtggaggttgtagtgagttgagatagtgttattgtattttagtttgggcgatagatttagatttagatttagattttgtttgaaaaaaaaaatagtaataataatattttgggtttttttttggtatatttgatagtgaaagaaattttttattattaaaagtaattgtgatttttatgtaatggtgattaagggtggatttagagttttaatttagaatttaaagttggtttggtagattgagttggtgaaggttaaaaagaaagaagtttttttatttgtttgaatttaaatatttttttttatatttatatgggagtattgttttttgagtatttgatatttgatattttagtttttatgtttggggtattttgggagggatgagttgggttttttagtattttggtgggaggaggatggcggtagatttttgagttgttttgttttgggagggtttgagtattcggaggtatgtagtgaggttagtttattttttttgtggtttaggtggataggtagtatggtttgttttgtatagaagggaatttagtttattagttgttggttgggtgaggattttggtatgttaggtgtttagtttttgtttgggtgtatagttaaagattttgtgttttgttttagttgtgtagttaataaatggagtcgatagttttgtgattttggtttggtgtttttttgttatattatttttagttttgagtttagggtaaagtattgttttggttaggggtgtttttgttgaggtttttgttttttaagtttgtgttgtgattgtattattgggtagtatttttagggtgtttagtattgtgtcggtggttgggggagatagtatttagattaaagggtagtaggtttggggtttttggtagagttaggaagaagtgttatagttattatttgtgttttttatataagggtaattggaatattgtataggaagggtagataaggggtagataagtaggtagagttaggtcgaggttattgtaaatattttatgatagttagatgtttagggatttgtattagtagtttaattgagatttggtggaacgtttgagagttggaatatgagtatgtttttagaaatgttatttgttgttttttttatagtaggaatttttttatttttttttttttgttttatttgatttggagttttaagtaaatattgcgtgttttttgtgatagatgttgttagagaatagtaagataggtttttatgaaataattattaaatgtatagtttttagtgaggggagttgtggaaggagtattgggagatttgagggagtgttttgaatagggttggagagtattttagatttaggggaaagttgatgttgaggagtttttgtgttgttatagttttagttgtgtattttaatatattatatttagaaagaggttatttatagtggagagagatagtggggtattttattattgtttttttagagtattttttttgttttcgtaattttattttaaaaatttagtatatttatttttaatgttgttttaatagttttattgtatttgtgtgatatttagttttatgttttataaaagtagatgtttgggattttttttattttagttagattatagttggtgtatttttaagtagttttttttgtcgggtagtggagtgtggtgggaggaattatagtgttaaattatttatttgttgtttttgtgatttttaattttttaggtaaggatttttagttttattgtttttatttgtgaatgaaagggttggtttttatttagaggtagattgtgggattatataggatggtttatgaaaggagtagggatttatattatatattgtgttttttttttttttttaatcgttgttatcgtttattttgtaaagttaggattgggtgtagtggtttatgtttgtaattttagtatttcgggaagtcgaggcgggcgggttacgaggttagaagttcgagattagtttggttaatatggtgaagttttattgttattaataatataaaaattagttaggtatgggtggtacgtgtttgtagttttagttatttaggaggtcgaggtaggagaatcgtttgaattcgggagatagaggttgtagtgagttgagatcgtattattgtatttagtgtaagattcggttttaaaaataaagttagatagtgttcgaggtttgggagtagaatttgattttgttataatgaaaggtttagtgggaagtaaattatttggagaggggaattgtgttttttgtggttagattttttaggttttacgtttgggaaattgcgttttagaaggttagtgagtagttgattttagttttaggtatgttgtttcgaattattcgttgttatagttgttttaaagatttttatttattttatttttatttgtgtggttgttgtaagtttgatatttttttttgatatattttttttgttttgtttattatttgggatttgttttttgttatttttaattgtagaggtatttaaagagtttttttttggggtatataggttttttgagtttaggtaagtttggagtagttgtttggttatttttagtagatgttgtaggattgtgattttgtataagtgttttttgtgtattttattaggttatgaggtagtttattattaaatgtagtagtgtgtggttaaaagggacgtggggtagagtttagtggtaaaaggttatttttttcgtggttgtgtttggtgttttaagagaatgagtttaagaatagtgggttatagttttttgatttttggggaagatcgtgagaaggatgttgtagttttttatgtgagagcggaggttgttttttttttatagataggagaataaaagttttatgtgttattttattgttggggttgggattggggtcgaggttaaggttaaggtttagtgggtttaagttaaaagttaattgtttatttatttttttttgttttttttttttttagt

SEQ ID NO: 2 - DNA, 10619 bp, Artificial Sequence
  chemically treated genomic DNA (Homo sapiens)
attagaaggaagagaaatagagggaagtaagtaagtagttaatttttgatttagatttattagattttgattttgatttcgattttagttttagttttagtagtgggatagtatatgaaatttttgtttttttatttgtgaaaggaggatagttttcgtttttatatgaagagttgtagtattttttttacgattttttttaagggttagaagattgtagtttattgtttttgagtttatttttttaggatattaaatatagttacgagaaaggtggttttttattattgagttttgttttacgttttttttgattatatattgttatatttagtggtgagttgttttatggtttagtgaaatgtatagaagatatttgtgtagagttataattttgtagtatttgttgggaatggttagataattgttttaggtttgtttggatttaaagggtttgtgtgttttagaaaagggttttttaagtgtttttgtagttaagaataataaggaataagttttagataatgagtaaagtagagaaagtgtgttagaaaaaagtgttaagtttgtagtagttatatagatgggagtggaatgaatggaggtttttgaggtaattgtgatagcggatggttcggggtagtatgtttagagttggagttagttgtttattggttttttggggcgtagttttttaggcgtaggatttgagaagtttggttatagggaatatagtttttttttttaggtggtttgttttttattaggttttttattgtgatagggttaggttttgtttttaggtttcgagtattgtttggttttgtttttgagatcgagttttgtattgagtgtagtggtgcgattttagtttattgtaatttttgtttttcgggtttaagcgatttttttgtttcggttttttgagtagttgggattataggtacgtgttatttatgtttggttaatttttgtattgttagtagtaatggggttttattatgttggttaggttggtttcgaatttttgatttcgtgattcgttcgtttcggtttttcgaagtgttgggattataggtatgaattattgtatttagttttggttttatagagtggacggtgatagcgattgggaagaaggggaagatatagtatgtagtgtgggtttttgttttttttataagttattttgtgtaattttataatttgtttttgggtgggaattagtttttttatttatagatggagatagtggggttggaaatttttgtttggggggttgggagttatagaggtagtaaatgaatgatttgatattatgattttttttattatattttattgttcggtaggaagagttatttaaaaatatattaattgtgatttgattaaagtaagggaagttttaaatatttgtttttatagaatataaagttaaatgttatatagatgtaataagattattaaaatagtattaaaagtaaatgtgttgaatttttaggatggagttgcggggatagggaaaatattttggaaaagtaatgataaggtattttattatttttttttattgtgagtggtttttttttggatgtgatgtattaaaatgtatagttaagattatggtagtataaggattttttaatattagtttttttttgggtttggaatgttttttagttttgtttagagtatttttttagattttttaatgttttttttatagttttttttattaagaattatgtatttggtgattattttataagggtttattttgttattttttagtaatatttgttatagagggtacgtagtgtttgtttagggttttaagttagatggaataaaaaaggaaggatggggaaatttttgttgtagaagagataataaatggtatttttgagagtatatttatgttttaatttttaaacgttttattagattttaattaggttgttgatatagatttttaagtatttggttattatggaatatttgtaatggtttcgatttggttttgtttgtttgtttattttttgtttattttttttgtgtaatgttttagttatttttgtataaagagtataggtaatggttatggtatttttttttggttttgttaggggttttagatttgttgttttttggtttgggtgttgttttttttaattatcggtatagtgttggatattttggaggtgttgtttaatggtgtaattatagtataagtttagaggataagagttttagtagaagtatttttgattaaagtaatgttttgttttaaatttaggattgagaatgatgtggtagaaaggtattaaattaaggttataagattatcgattttatttgttagttgtatagttgaggtaaggtatagaatttttggttgtgtatttaagtaaaaattgagtatttaatatattagggtttttatttaattagtagttggtgaattgggtttttttttgtgtagaataggttatgttatttgtttatttaggttatagagagaatgaattgattttattgtatgttttcgggtgtttaaatttttttaggatagagtaatttaaaggtttatcgttattttttttttattaaaatgttggagggtttagtttattttttttaagatgttttaggtatgagggttaaagtgttaggtattagatatttagagaataatatttttatgtaaatgtaaaagaaggtatttaaatttaagtaagtgaaaaggtttttttttttttggtttttattagtttagtttattagattaattttaaattttgaattaaaattttgaatttatttttaattattattatataaaaattatagttatttttaataataaagagttttttttattattaagtatattaaaggaaagtttagaatgttgttattattatttttttttttagatagggtttgggtttgggtttgggtttgtcgtttaggttggagtgtagtggtattattttagtttattgtaatttttattttttaggtttaagtaattttttagttttagttttcggagtagttgggttttaataggtacgtattattacgattcgttaattattgtatttttttgtagagataggttttattatgttggttaggttggttttaaattgttgagtttaagtaatttgtttattttagttttttaaagtgttgagattataagtatgcgttattaagttcggttttagaatgttaaatttgattaggtttagttttttttattcggttttttttatagttaagttttttttaattttttttatagcggtgttgttttagttttaatatagtttggatttgggttttgtttgtttttttattagaatacggtattttgtttatttgttaaggcgtttggatgttttttttttagaataatatttaaaaatgcgtaataaaaaggttcgtaaatggttagttacggtggtttatgtttgtaattttagtattttgtggggtcgaggtgtatggatcgtttgagtttaggagtttgagattagtttgggtaatatagtgagattttattttaaaaaataaaataaataaaaaggttcgaaaaggaaatattgagataattattaaaatatttgaaaggtaatttgggtatagtaattcgtgagtttttaagtattaaataataagatttagtatagtttttaataattgtgatttttgtagtaatgagagtaaattatattttgaaaaatttttaattgtaaagtgatatgaaaatatttgtaattattattggtgaaaaaaaaatagggattgttaatatgtttttgttttgttgtttatatttatgattagaggaaataattttatttagaggttagtggagatggagatattaatttttttttatttaaatttatggattttttgttttttatttattattttatagattttggggtaagagtttttgtattaggagtgagaattttataataggttgttttgtatatttaaagtaagttttaggttttttagtgggtaataaggttttttaaattgtaggttttgtttatttttttatttttatttttttgttttatttttgtgaattaacgatttttaattaagtttttatttttagttgggttatttcggatttttaggtatataatgtttagagtatagttttattaggtggtatttatttttttttacggtaatgtttgtttattagttatttttcgtttaattaaattggaaatttttaaaggtggattttgtgtttttaaaatttaatagagtgtttagaatttaaaaaatgtttattaaataagtattgtgtgttacgtattgatttaggtatgtttcgaggatattaagatgataggtatattgtgaaataagataacggaagtatatttggtatttgggtatttattcggtaaatgtcgtttttttttgtattaagtattgaaaatttattgagggatatttggttatttttaaaatatattatagtttatggaagggaggaaaattaagttattttgattatgagtattaagtttgggtaatatgttggaagcgaggaggaatagggtagatgagaattagaattattaatataaaggtagatatcggtaaattggaagttggaggtaggagtttttgggaaatgataggggtttttaagtttattattttatagaaggtttaggaaattttagaaggggatttaatttattaaaaagtttatatgagaaatttttttggagttatttttatttaaattagatagttgtaaatgtattaagagaacgcgtttgtgaatttggaaaatttggggaaaatgttattttaaagtataaattaggtttaaagtgaatgtattgtatagaaatgatatttttttgtatagttttgtttaattaaaataaaaaatgagagtgagcgtttaaatgacgtgttgaaatgattgttaaaaataggtttaataaaaaaagaaaaaaatttatatgttagtcgttattatttatgtagaataaaaattttttagaataagataggttaaaattagattagtttaaagagattatgtataatttttttttaatttttgaggcgaacggtagtaataaaatatcgttatttagaaaggagaagagaagaggtttttcgtttttataaagcgaaaggtaatattagttgtagattttatttttcgggttttttttgtaatattagtaaaatttttcggaagggtcggtcgggtcgttcgggaggaggggcggtcgcgggtttataggttttaagtgtcgtttcgagggttcgggttcgggttcgttcgttttttggggtcgtttttttttagttttttcggatatagttaattcggggcgtcgcgttttcgtttcgtcgttcgtatagggttcgtatttgtattatgatggttattcggagcgagtttttggggatgttttcgttgtattttttgtaagaggcgcgttcgtttttggcgtattcgattcgatagagtttattcgaagatttcgttatttttttttagttgtcgttaaagtttcggaagttcgacgttacgatttagaaatacgttgtcgtttcgtcgtttcgcgtgcgtttatttagtcgtagtttttgagcggttagagtcgttatcgaatacgtcgtatcggttatcgtcgttttttgatagattgttgatgtttggtcgcgggaacgtttacggaattcgcgtttacggggcggggtcggcggcgcgcgttttttgtcggtcggggggcggagtttttcgggcgtttgtcgggtggagttttgcggtcgttgtttgggggtcgaggcggggtttgggttgagttagtagttttttggaggattcggcgttatttttttgattgttttgttttaggaagttttatttgattttataattaattttatttttaattttttttttttttatttttgagattgagttttatcgcgttggagtgtagtgtcgttattatggtttattgtagtttggaatttttgagtttagcgatttttttattttagtttttcgagtagttgggattataggcgtttattataattggttaattaaaaaaaaattttttttagggatagggtttcgttaagttggttagattggttttaaatttttgttataagtgatttttacgttttagtttttcgaagtgttgggattaggggtatgtgttattacgtcggttttaaatttttaagtgtgtttttttttttttgagggtagttgggttcgggaagtcgggttttcgtttcgggaatatagttgattggttcgaggtggattttgtagtgttaggtttatttttttggtttggacgggcgttttaatttgtcgtttatagatcgtcgggataaaatattaattgaaatttagtattttttttattatgaatttgattataaatattaggagtattagtagtatttgtgattttgtgggtaatagttattatagacgtttttatgttattttatagttgttggtgataattcgaaatattattaagtttattattattcgaaattgtggtaatgatagtatttgttgttattagatattttgtgtgtgtgtgtgtgtgtgtgtgtgtgtgtaaagaaagagatggggaatttttttatgttgtttaggttggttttgaatttttggttttaagtaatttttttatttcgattttttaaattgttgggattataggtatgagttattgtatttggtttagattttgttgtttaatatagaattatattttaaaatatagtttattaaaattggttttttttttaattttatgtatttttttttttattttaaagattgtaatatgagtgtgttttatttgaaaatatttaattttggtatagaggataagaaaaataagtagatgaataaaatttataaaaagtgttaattatagagaagaagttagtggtttaagagataaggatgttgagtaagtaagaaggttgtgagatataggtcgaattttaaaagttagtaattagttagatacgttgaaggtaggttgggtatagtggtttatgtttataattttagtattttgggaggttgaggtggtcggattttttgagtttaggagtttaagattagtttggataatatggtaaaattttgtttttataaaaattagttgggggtggtggtaggtgtttgtagttttatttattcgggaggttgaggtgggaggattatttgagttttgaaggttgaggttgtggtgagttatgatagtgttattggattttagtttgggtgatagtgtgattttgttttaaaaaaaaaaaaaagatattttgaaggtaaatagaataagtggaaaatatgatggaataaataaaagttttatttagagaatgattaagttaaaaggtatgattatgttatttttgggttgataattatattatttttaaatggttatttattggtgataagattatggttttattttggtatttatatgttttgttttaaaaatgtagttaaagtttaggtttgtttagtaggttgattggtgagttgtagttgtggttgagtgtgtttgtatttgtgtttttttgatagtgtagtgtgagttgttttaggtattttttgttgagtcgttttgagtatttttaattttgttagtgggataggttgatgcggtagagagagggaaaatatattaatattagttaggtgtagtggtttatgtttgtaattttagcgttttgggaatttgaggcgggtggattatttaaggttaggagtttaaaattagtttggttaatatggtgaaatttcgtttttattaagaatataaaaattagttgggtattgtggtgcgtgtttgtaattttagttattcgggaggttgaggtatgagaatcgtttgaatttaggaggtggaagttgtagtgagtcgagattacgttattgtattttagtttgggtaatatagtgagatagttttaaaaaaagaaaagaagagaggggaggggaggattttttaattttaggttttggtggtgtggtttatttgtttcgtttgtattttattttgtgtatgttatgtattttatcgagtttttgttgtaagtggttttaaattgatttaataaatttgtaatttaagtattataatttggtttgtgaggttttttgttttgtaatttgtgggatagtttgtttgataatgtatttagaagttattattgtattaaggtaggtttttttataatatttattttggaaagggttttatggattattaaaggggttttaggtatatatataaaaggttaagaatttttgttttagaatttaaggaaagttaattattatttattgtttttttaatattttagtttggatggtttatatgtatttttatttatgtttaaaattgttttagtgttttttattttaggaaatggtttattattttttgtattatttaggttaaatgttttgtagttaatttgattttttttttttgttttatgtttaatttattttcgaattttaattttttgattttgatttttttttatggtttagttgttattttttttggtggttttgtattttttattagaatgtaagttttatgagggtaggagtttgtgtttgttttgttgtaatagttttagtgtttggaatagtgttaggtatttattaatatttgttgaatgaatgattgaattttatagttggtttttttttcgtataggttaatagtttaattaataatgttattttatatttgtatataattaatttatattgtgttttaaatttgaaatttttatgttgatttataatttttatagtatattaggtaaagttggtggttatataaaatattattaggatagggttgtttgaagaattatttgataatttttgttaataatataaaaatagaaaaagaacgttattatgtagtttataaataaattttaggtggttttatattttaatttttttttttaaaaggaatgagttgtgtttaggtaggttaaatgttttatagataagagaaaaaaaaaaaaagttgttatagaattattttatttgttattattatcgattttattttttattttttttattttttttgttttttttcgttttgttttttttttttgtttttttcggttttgatagtattatttttgttatattagtttttttttggttggatatgtagtattttgtttttggtattttttttttagttgagaagttttttttttgggttgtttgttatttgtagtatggttatttatgttttttttaggtttttggtattattgttagtggatagatcgggattttttttgatttgagggtagtatttagaatataaagtgaaagtttaaaggaggtttttcgggtgtattagaatttttgaatttttgttttattttttttttaggagggatattagtttttattttttttttataaagggttttgaatatttttggttatgtttttaatttttttttttttagtaagtaaggttttttatttttttgaatatgttaatgaatattttgagaagatgaatgaagtgtttggttgttttttttgtattttggtaagcgtgcgtagaatgttcgtgatgatattttgtttttgggattattgggttttttttcgtttatgtttagttatttttgtttagtgaggtatagaattatttagtgtttatttggtttttatttattttggtagtgtttttaggtaaggagttttagattagtttggataatatagtacgattttgtttttatatatataaaaaagtaaataaatttataataaatatttggtgtaaggtatgggtttagttatatttttttgtatgtggagatttattatttgtggaagagattgttttttttttattgaatgattttggtatttttgttgaaattatttaattatatatgttgagggtttatttttgggttttttattttgttttattggtttatatgtttgtttttattttaacgttatattatagtaagttttgaaattagaaagtgtgagatttttaattttatttttattttataaagttgatttgttttggtttggttttatattttgttaagattgattaggagtggaaagaagagatggtggttcgtgtttgtaattttagtattttgggaggttaaggtaggcggattataaggttaggagtttgagattagtttgattaatacggtgaaattttgtttttattaaaaatataaaataattagttgggtatggtggtgtatgtttataatttaagttatttaggaggttgaggtaggagaattttttgattttgggaggtagaggttgtagtgagtcgagattgtattattgtattttagtttggtcgatagattaagattttgtattaaaaagaaaaaaaagaaagaagagagatatataattttgattgttggtgtatgtgtgtgtggtggtggggtgggggggatgtttaaagttttatattagggattttttgttaagtaggtgaggt

SEQ ID NO: 3 - DNA, 6665 bp, Artificial Sequence
  chemically treated genomic DNA (Homo sapiens)
tttattttaatttatattgaattatattaattattttaatgggatttatataattttattttattaagttaatttttgagtgttaaaaatttaattttaatttattatttattgtgatatggagtttatgtttaatacgagatattttaaggtattgagtataataattatgagtaatttaattaagatataaaataaggtatagttatttttaaaaagttatttagttattttttaaaattatatggggtataatgtttaaatttgttggaattttaggtataagtataatttgagtatttattaagtttacgaggttttttaattggtgtattttggtaaatgttaaagttaatttagagtttttagttttggttaggcgtggtggtttacgtttgtaattttagtattttgggaggtcgagataggcggattatttgaggttaggagttcgagattagtttggcgaatatatagtgaaattttatttttattaaaaaatataaaaattagttggatgtggtggtgtgttttcgtagttttagttatttgggaagttgaggtaggagaattatttgaatttgggaggcgggggttgtagtgagttaagatggtattatcgtattttagtttgggtgatagagtaagattttatttttttttaaaaaaagtaaaaaatagaaaataaaaaattttatagttttaaatttaattacgattttagttatttttttgttatataaattttttggtatataaattttcgatttttaattgggtgaaattatggatgtttgttttaatttagatatacgtttgatatttttatttatgtatatgtataatttatttattatgtttatattaatttaaatgtttattaatgatagattagataaagaaaatgtggtatatatatattatgggttattatatagttataaaaaagaataagattatgttttttgtaggaatatggatggaattggaggttattatttttagtaaattaatttaagaatagaaaattaagtttagtatttttttattgataaatgggagttaaacgaaagaatttatgaatataaagaaggaaatagtagatattggggtttatttgagggggggagggtgggaggagggagaggagtagaaaagttaattattgggtatgggtttaatatttgggtgatgaaataatatgtataataaaattttatgatatatgtttatttgtgtaatgagtttttatatgcgtttttaaatttaaaataaaaattaataaaaattttatttatatataatttagttggttattttttttttttttttgtgttatagtttggatgtttggttttttttaaattttatgtcgaaatttgatttttagtgttggagagggagtttaatggaaggtgttggggttatgggggaggatgttttatgaatagattaatgtttttttttgggggtgagttttgattttattagtttttataagagttggttgttaaaaagattttggtatttttttttatttttgtttttttttttgttttgtgatttttgtatatattggtttttttttgttttttgttatgagtggaagtagtttgaggatataatcggatgtagatgtttaattttgaatttttttagatattagaattgtgagttaaatgtattttttttttttataaattatatagttttaggaattttttataatataaaatagatttaggtattttgaatttaggttttttttttttttattttttttttttatgttgttataagaaaaattgggattgtaatatatttttaaattgagaaggagttaagaaattaaagaatggtttagataaatttaggtttgtgagtagatgaatttattaggatttatatataaggtatttttggtgggagtaggatagttttagagatttgttttattatttagttttaagttttttttaagcgaatattttggttttttgtttattgtttgtaatgagattgttttttttggtatgtttttagagatattttgggatgtttgggttgttagggatattttttttttaggtaggtattatggtttttgtttagtgtttagtttttagggtgtaagtagtaaaaataaatttttaagtaatttggtcggggattcgttatattatattttttagttttaggttgttttagtttttatttttgattgataagaggaaagaatggaggagaaagggatatagtgttttttggtagtagtttttttttggataagtttttgtagtttatttttttttatttttttgttaaataaaatattttagagtggtttgtatttttaggttaaaatttttttttttttttttattttttttggttttttttgttttaattatttttttttttttttgtttttttggatatttatttgataatttaggtaaatatagagttaaggagttaagtaaattttaaataagataaatttaaagaaaattgtgttaagataaattttaattaaatatttgaaaattaaggatataaaatatatttaaagtagttagtgaaaatattttttttatagagaataataatttgaatgatagtggaattatggagaatagaagaaagtgttataatattttttaagtattgaataaaaagaatttttaatttagaattttatgtatagagaatgtattttttaggaatgaaaggaaaattaaggtatttttagatgaaggaaaaataagagaatttattgttattattaaaagatttattttaatagaatagttaaaagaagttatttaaatagggaggtaatgaaaaaaaaaaaaggagttatggaatattagaaaggaagaaagaatatagtaagtaaaaatatgggtaaatgtaatatgttttttttttttgtttgagttttttaaattatgtttgatagttggagtaaaaattataatattttttgatgtggttttatatgtttgtagaggaaatatttaatataattttattataaataaagaaaggtggttaaagagatatgattggaggtaaaatttttatattttattagaattagtaaaatgatgatattagtttattgtgaaaaattatgtatatataatgtaatatttatagtaattattataaaagttatataacgagatatattaaaaatataatagataatttagaattttgtttaatatttaatttataggaaggtagggaaaagaaaaaaatattaagaatatagagaagaaatagaaattaaaaaataaaatggtatatttaagtttaaatatattaataattatataatatataaagggtttaaatatattaattaaagaattatttggtagagtggattaaaaattatgatttagtgtatggtgtttataaggaatttattttaaatgtatgaaagttgaaaataaaatgatggaaaaaggtatattatgtagggttaggtatggtggtttatatttgtaattttagtattttgggaggttaaggtggtggattagttgaggttaagagtttaagattagattggttaatatggtgaaatttttttatttttattaaaaatataaaaattaggtggatttggtggtgggtgtttgtaattttagttatttgggaggttgaggtgggaggattatttgaatttgggatgttgagattgtagtgagttaagattgtgttattgtattttagtttgggtgatagagtaaggtttcgtttaaaaaaaaaaaaaaaaaaaaaaaaagatatattatgtaaataaaagagagtaggtgcggttatataaatattagataaagtaaagaaaattattagagacgtatagggatattatattaatgatgaaaagattagttaattaggaagatatggttatttatatgtatgtatattaaataatagagttgtaaaatatgtgatataaaaagtgatagtattgaaaggagaagtagattttataattgtagttagggacgttattatttttgtatttcgtagtataagtagattaaaaaatttataaggtagatttgagagtagtttgtataatatagtaagattttatttttaaaaaaaatttttgggggggtatgttggtgtatgtttgtagttttagttatttgagaggttgaagtgggaggtttgtttgagtttaggaaatgaggttgtagtgaattatgattatgttattgtattttagttttagtgatagagcgagatttcgttttaaagaaaatttgtaagggtatagaagaatttaatattattagttaatatgttatttaataatagtaaaatatatattttttttaaatgtttatggaatatatattaagatagattagaatttgagttataaaataaatttaaataaatgttaaagaattgaaattatatttagagtgtgttttatgattaaaatggaattaaattataaattaatggtagaaaggtaataggaaaatttttaaatatttagaaagttaaaacgtatttttaagtaatttataggataaagaggttgttttagggtaaattttaaaaatgtagtcgagtgaaaatgaaaatatattaaaattcgtgagatatagataatgagagtgaggagatttagtgatgagtaaaatttaagtgtatatattagtgtggtaggttaaattatggtttttttcgagtagcgcgttaggtcgttatttttcgcgggcggtgttgttaaggtaggttatttgcgcggggtagttagagtttttttatttgagcgggttgtggcggagagcggggtagggattggttggagtgtggtagtttagcggggcgggggcgggggcggggtcggtttttggtttttttttttttcgtaggtggttggaggtcgtagagtaatatagttcgtttatttttcgtcggtcgcgttttttttcggtttttttcgcgttatcggagttgcggcgttcgttaagaattatttggaggtattttttttgtttagcggcgattgcggtcgttttagggcgcggtttagaggaaattgggtgacggtggtgttcggtgtgtagtggggcgacgaaggtaaaggggaggtggcggatttattggcgtaggattttatgtgtcgttgttagggaggaaataatgttggttatatagttgttgtgtattttgtggagtatgatttttattttttatttagtggaataattattttaaatgttattgtatttaatggaaatggtgtggtaatttatttatttggattgtttgaagaagtagagaaaaatgtttaaaaaggaaaaggattagaaggttgggaaaaaggtttattttatttgatagagtttatattgtatttgatttttattaagtcgttgatggtgtttaggaataatagagataagaataagtaggaaaaaatttgggtataataaaaaagggtattggtttagtttatttttttaaagttgttcggagtggatttaggatgtgcgattttgtttttgattttgttggtttttttgagatgtttaaagttttagttaaataatataaatttatatattttattttggaaatagatattgaaggtgaattataaaattttaaggaaattggagaattattataaataaagggtagagagtttggtgtaattattggaaggaaaagaagatgtggttggttggatttcgttttgtttaaatatgtttatattattaatggatttattgcgttggaagttattaagttgaatattttggatatgtttatggaaattaaagttggagttgtttataagttagatggttaaattatattttatattttagtaaattaagaagttttaaagttgaagtttaatataagattttatgagaatggaatatagatatattaaatgtaagggtatttaaagaattatttgttaatgtataaaattatgttcgatttattgaagatgagttttaaattttagttaaatggattggtgttggtaaatttagagtttatgatttaatttttcgaatgattgatagtaaagtaagaaatattttttgagagggaggggaaaagatttttttaaatattttaattaagatttataaatttaagaataaataaattgaagtgagttttaggttttacggttgtttttagtttttttagatggatatttattgtggagattaattttggtatattttagtgttagttttttttagttggtataatttgttgtttttgttgtttttatggtgttatttttttttttaatgtttagtaataatataatttatgtttgaaatttaaagtagaattatttttaatgtagtttttttttattattgttattgtgtgtttttaagttttatttttattagatagtaagaataattaatgtagttttgtataaatatttttatattttgattatttaattttgtcgttgtaatttttgttgttagaaataaatgatgaaaatataggggttttgtaaatttttgtaatgttatgagttttgtttaaattgtggattgtttattttttgttgagattattgtaaaatttgaaagtcggtagttttaaagattggtggtagataagtttataaaaat

SEQ ID NO: 4 - DNA, 6665 bp, Artificial Sequence
  chemically treated genomic DNA (Homo sapiens)
atttttgtgggtttatttattattaatttttgaggttgtcgatttttaaattttgtaatggttttagtagaaaataaatagtttataatttaaatagaatttatagtattataaaagtttatagaatttttatgtttttattatttgtttttaataataaagattataacgatagaattgaatgattagaatgtaaaaatatttgtgtaaaattgtattaattgtttttattatttaataggggtaaaatttaagaatatataatgataataatgaagaaaaattatattaaaagtaattttattttagattttaaatatgaattatattattattaaatattaaaaaaaaaagtggtattatgagagtagtaggagtaataaattatgttagttaaggaaagttgatattggaatatgttaaagttaatttttataataggtatttatttgaaaagattggaaataatcgtagggtttaaaatttattttaatttatttatttttgaatttgtaggttttaattgaagtatttaagaaagttttttttttttttttttaaggagtgttttttgttttattgttaattattcgaagagttgaattatagattttggatttattaatattaatttatttaattggaatttgaagtttatttttaataaatcgaatatagttttgtgtattaataggtagttttttaaatgtttttgtatttgatatgtttgtgttttatttttatggagttttatattgaattttaattttaagattttttgatttgttggaatatgaggtatgatttgattatttaatttgtaagtaattttaattttgatttttataaatatgtttaaaatatttaatttggtaatttttagcgtagtaaatttattgataatatgagtatatttgagtaaaacgaggtttaattagttatatttttttttttttttaatagttatattaaattttttattttttgtttgtaataattttttaatttttttgagattttgtaatttatttttaatgtttatttttaaagtgggatgtatagatttgtattgtttagttggaattttaaatattttagagaagttaataaggttagaaataagatcgtatattttaagtttatttcgagtagttttggaagaataaattgggttaatgtttttttttgttgtatttaaatttttttttgtttgtttttgtttttgttgtttttggatattattagcggtttgatgaaaattaaatataatatgagttttgttagataaaataagttttttttttagttttttagttttttttttttttgaatatttttttttgtttttttaaataatttaggtagatgaattattatattatttttattgaatgtagtaatatttggaataattattttattgggtaagagatgaaaattatattttatagaatgtataataattgtatggttagtattattttttttttggtagcggtatatggggttttgcgttagtagattcgttattttttttttgttttcgtcgttttattgtatatcgagtattatcgttatttagttttttttgggtcgcgttttggggcggtcgtaatcgtcgttgggtagggaggatgtttttaggtagtttttggcgaacgtcgtagtttcggtgacgcgaggagagtcggaaggagacgcggtcggcgagaggtgagcgaattgtattgttttgcggtttttagttatttgcggaggaagagggagttagaggtcggtttcgttttcgttttcgtttcgttgggttgttatattttagttaatttttgtttcgtttttcgttataattcgtttaagtagggggattttgattgtttcgcgtaggtggtttgttttggtagtatcgttcgcgggaagtggcggtttggcgcgttattcggagaaggttataatttagtttattatattaatatgtgtatttaaattttatttattattgaatttttttatttttattatttatgttttacgaattttgatatgtttttatttttattcgattgtatttttaaaatttattttgagataatttttttgttttatggattatttagaagtacgttttaattttttaagtgtttggaaatttttttgttatttttttgttattgatttgtagtttggttttattttggttatagaatatattttgagtataattttaattttttaatatttgtttaggtttgttttatggtttaggttttggtttattttggtatatgttttataggtatttgagaagaatatatgttttgttgttgttgagtaatatgttgattggtggtgttaagtttttttatatttttgtagattttttttaagacggggtttcgttttgttattgaggttggagtgtagtggtatgattatagtttattgtaattttattttttggatttaagtaagttttttattttagttttttaagtagttagaattataggtatgtattaatatgtttttttagaaattttttttaagaatggggttttgttgtgttgtgtaggttgtttttaaatttgttttatagattttttggtttatttgtattacgaggtataagggtgatgacgtttttaattataattgtgaagtttatttttttttttagtgttattattttttgtgttatatattttgtagttttgttgtttgatatatatatatgtagatggttatatttttttggttaattgatttttttattattaatataatatttttatgcgtttttggtaattttttttattttatttgatatttgtatagtcgtatttgtttttttttgtttgtataatatgtttttttttttttttttttttttttttagacgaagttttgttttgttatttaggttggagtgtagtggtataattttggtttattgtagttttagtattttaggtttaagtgatttttttattttagttttttaagtagttgagattataggtatttattattaagtttatttaatttttgtatttttagtagagatgggggggttttattatgttggttagtttggttttgaatttttggttttaattgatttattattttggttttttagagtgttggaattataggtgtgagttattatatttggttttatatgatatgtttttttttattattttatttttaatttttatatatttgaagtgagttttttatagatattatatattgggttataatttttaatttattttgttaaatggttttttaattggtatatttagattttttatatattatataattattgatatgtttgggtttaagtatgttattttattttttgatttttattttttttttgtgtttttaatattttttttttttttttgtttttttatgggttgaatattgggtagaattttgagttatttattatgtttttagtgtatttcgttgtatagtttttatagtaattgttgtaggtattatattatatatatataattttttatagtgaattggtgttattattttattagttttagtgaaatatagaaattttatttttagttatgtttttttaattatttttttttgtttataataaaattgtattaaatattttttttataaatatgtagaattatattagagaatgttataatttttattttaattgttaaatataatttagaagatttaagtagagagagaaagtatattgtatttatttatatttttatttattgtgttttttttttttttttgatgttttataatttttttttttttttttattgtttttttgtttagataattttttttagttgttttgttagagtaggttttttggtgatggtaatgaatttttttattttttttttatttgagaatgttttggttttttttttatttttaaagaatatattttttgtgtataggattttgagttgagagttttttttatttagtatttgaaaaatgttatgatatttttttttgttttttatgattttattgttatttaaattgttattttttataaagaaggtgtttttattggttgttttaaatatattttatgtttttagtttttagatatttaattaaaatttgttttggtataattttttttgagtttattttgtttgggatttgtttagttttttgattttgtgtttatttgagttattaggtaaatatttaagagaataaaaaaggaaaaaaatgattgggataaaggagattaaaaggagtgaaagagagaaggaaaattttaatttagagatataagttattttaaaatattttgtttaataaaaaagtgggagaaagtggattgtaggggtttgtttagggaaaggttattgttaagaagtattgtgttttttttttttttattttttttttttattagttagagatagaaattaaaatagtttaaaattggggggtgtagtgtgacggattttcgattaggttatttaagggtttatttttgttgtttgtattttgaaggttgagtattgagtaaaggttatgatgtttatttgaggagaaggtgtttttgataatttaaatattttagaatgtttttgggaatatattaaggaaaatagttttattgtaaatagtaggtaaagagttagaatattcgtttaaaagaagtttagggttgggtgatggggtaggtttttggagttattttgtttttattaggaatattttgtatgtaagttttgataaatttatttatttataaatttagatttgtttgagttattttttggttttttggtttttttttagtttgggagtatgttgtagttttagttttttttgtaatagtatgagggagaggaatagaaaaaaaaaaaatttgaatttagggtgtttaagtttattttgtgttataaggaatttttgaggttgtgtaatttgtaaagaaaaaggatgtatttggtttataattttgatgtttaggaaagtttaagattgggtatttgtattcggttatgtttttaggttgtttttatttatggtaggaggtaaagagaagttagtgtgtgtagagattataaggtaagagaggaaataagagtagagagaggtgttagggtttttttaataattaatttttatgggaattaataaagttagaatttatttttaagaaagggtattaatttatttatgagatatttttttttatgattttaatattttttattgggttttttttttaatattgaggattaaatttcgatatggggtttggaggggattaaatatttaaattatagtatagggagagaaaaaaaataattaattgaattatatgtagataaaatttttgttaatttttattttaggtttgggggcgtatgtgaaggtttattatataggtaaatatgtgttatggggttttgttatatatattattttattatttaggtattaagtttatatttaatagttaatttttttgtttttttttttttttttatttttttttttttaaatagattttagtgtttgttgtttttttttttgtgtttataagttttttcgtttagtttttatttattagtgagaagatgttggatttggttttttgtttttaagttagtttgttaagggtaatggtttttagttttatttatgtttttgtaaaagatatgattttgtttttttttatggttgtgtagtagtttatggtgtatatgtattatattttttttatttaatttgttattgatgagtatttaggttaatatagatataatgaatagattgtatatgtatatagataaagatattaaacgtatatttaaattaaaataaatatttataattttatttaattggaaatcgaaaatttgtatattaaagaatttatataataaaaagatagttaaggtcgtgattgggtttagaattgtaaggttttttgttttttgttttttgttttttttagagagagataaagttttgttttgttatttaggttggagtgcggtggtgttattttggtttattgtaattttcgttttttaggtttaagtgatttttttgttttagttttttaagtagttgggattacgggagtatattattatatttagttaatttttgtattttttagtagagatgaggttttattatatgttcgttaggttggtttcgaatttttggttttaagtgattcgtttgtttcggttttttaaagtgttgggattataggcgtgagttattacgtttggttagaattgaaagttttaaattaattttaatatttgttaaaatgtattaattgagaaatttcgtggatttaataaatatttaaattatatttatgtttgaggttttaataaatttaaatattgtattttatataattttaaaaggtagttaaatagttttttaaaaatagttatgttttattttatattttgattgaattgtttatagttgttgtatttagtgttttaaagtatttcgtattgaatatagattttatgttataataaataataaattaaaattaaatttttggtatttaaaaattggtttgataaaataggattatataaattttattaaaatagttaatatggtttaatgtaagttaaaatagg

SEQ ID NO: 5 - DNA, 7450 bp, Artificial Sequence
  chemically treated genomic DNA (Homo sapiens)
  unsure (4653, 5152, 5156..5157, 5159, 5722)
ttagatttgttaatcgtgtttttaattgtaattattttagaaattttgttatttatagataattgtcgttttgttttaagtttttttaagagatagtttataattagttataagattttaataggtgtttttatatgtaggtttttgataattttggaaatcgtgatatgggagtaaagatatatatattattagtttagattttttaatggttagtagtttaattagatattttatgtttttttgaattaattatggtatttttaattttgtagaaaattaatttatttaattttttaaatatattagtataaagttgtgtttagtatttttatataaatttttttatattatttgtatatgtgtttttttatttttattatgtttttttttgaagttttattattttttattgagataaatttatatataattaaagtgtaaaaattttaagtgtatagtttgataaatttttatatatatatgtgtgtatatatatatttgtttaatttttaataaaattaaaatatagaatatttttaatatttttagaaggtatttttgtggtttttaagttaataattttaaaatgtttatgtaagtaagtttgtttgaattttatgtaaataaaatgttatagtatgtattttttttttttaatttgtaagattaatttttgttgttgtatgtattagtagtatatttgttttgtagggttttttgaaaattaagtattttattatttgagttgattatttaattttatttttattttttatttttatttttttgagatagttttattttattttgtcgtttagattggagtgtattggtataattttagtttattgtaatttttattttttagttttaagtaatttttatgttttagttaggttggttttaaatttttggttttaagtgattcgtttgtttggttttttaaagtgttgggattataggtgtgagttacggtatttagtttgataatttaattttatttgttttaattgggttttgtgatttaggtattgttttttgttaagagttttagaatgttgttttgtttttataattttgaaaaatagttttaggaataatatttaggttatttttttaaataaaaataaaagataagtgtaaaagaaaaaaagaaaagagtgtgttattagaaggataatgaggttgtttgatttgtaaaaggaaatatttatagttggagataaatggtaaagttgtttagttaggtaggtttttaaaagtattttaatttttttaatgattatgtttggggttattttggtattttttttataagtaaattttgtggttataggtttttttattttaaaaagaataattaaattttttataaaattatttttatttttttttgttgagggttttagaattttttagttttgtggagttgtttagttttttttttggattttgtttttaaaaatagatagaagggtaattcgttcgggtttttttttatattgtggaagttttgttttttcgttttttataataaattttgttgttgtttatttaaaaaaaaaaaaaaggaaaggaaataggttatagatagaaaataggttattgattgttttaggattaggaatgtagaagggaggattataatggagtaagagtaattttttaggggtgatggatatgtttatttattttggttgaagtgatgggtttataggtatatagatatgttaaaatttattaaattgtatatattaaatatgtaaagtttattatatgttaattttatttaaaaaaatttgttaaaaatggaatagatataatatttataaaatatatgtaggttataataaattatgaaataatagaatattttttgtatttattatttagttttttaaagtaaatgtttattatttttaaaaaattatttttttttgtgttttttagttattttaaagtttaggtttttttttttttttttttttttttttttttttttttttttaaagagatagagttttattatgttgtttagataggatttgaatttttgggtttaaggtatgtttttgttttagttttttagtagttgagattatgggtatttattattgtgtttagattcgggtttttttgtaaaaagcggatggatgtttgaaattattttttgaatttttttggtttttaaatgtgaatattttgggaaatatttttatttaaattagttgagtaatcgagtagttaggtatattttgaagattgaggtttgttttttaaaagaagggtagtttataaattgatttttttgagttaaaaattgttttaaaaggggaagtatagtttaaaatagtgattttaaaatattaataaaaagagttaaattttgtaaaatatttaaagagatttattttgagttaaatatgagtgattatgttttgtgatatagttttcgggaaattttgagaatatgtgtttaaggtggttagggtatagtttggttttttatattttagggagatatgaggttttaattaaatatatttaagaaatatattggtttagtttagaaaggtaggataattcgacgcgaggtagggagtttttaggttataggtacgttttaaatttttttggttgataattggttgagtttatttaaagatttgggattaatagaaaggaaatgtttgggttgtaataagagttgtggagattgaagttttattatgtagatgaagtttttaagtagtaggttttagagagaatagattgtaaatgtatttaaggtttgcgttgatgtgaatgtcggtttgaggtataatgaggtatatttgatttttatttttttttatggtttgaaataattttttaagttaaattttaaaagcgttttggttaaggagaaagtttatttagatggttagaggttttagaatattatttttggtttataaaaacgttgagttgtgaatattgagagtttttgtttagaatgtaaaagagagaatttttgttgattgtggtcgggtatgtatgtttttttattttttttttttttttttaaaaaaaaaaaaaaaaaaaaaaaaaatagggtttgggcgggggaagtaagggggatgtgttatgataaaggggttttggtagtatttttttggtgtggtttgattaggttttatttacgaattttgtttttttttagaggttattggagagttcggtggggtgtaagtatattgcgtttataaaattttagtaggaagttagtagttgtttttaaatttagagaaggggaaataggaatcgattaggaataaaggattataatttattttttttttgaggaaaagttgggaatttttttattttgttttatgaaaattaagttgaatcgattgttgttaaatatttattaggtaaaattggttttttgtttatgatttgattttttagtatagttagtttttttttttttttgtagttgattggttttggagtgtggttagaagttttttttttgtaattaaaggagtcgggtttttaattgttgatttgttttttttttttttgagtaatggagtttattatttttattttgagattggttatttatattttgatattttttttgtatttgttgaattttttgggtttgtggagttggatatgtaaaaaatggtttttttattttttggtgaggtttattgtgatatataacgaatagatggtaagtaagaagcgggagttttttagtaatttgtaggagtttgcgggttttttcgggaaattttttttgttggaagtgggttgtggtacgggggttaattttaagttttatttatttgggtgtagggtgatttgtattgattttaattttaattttgagaagtttttgattaagagtattgtagagaatcgatatttgtagtttgagcgttttgtggtagttgtcggggagaatatgtattaggtggttgatggttttgtggatgtggtggtttgtattttggtgttgtgttttgtgaagaattaggagcggatttttcgcgaggtgtgtagagtgttgagatcggtgagtgaaagggtgtgaggaggattagttagtagtagttattattatagagggtaggtttgttaattttaggtggttgaaatattttaatataaaaagtaaattattagaaaatattgtagaattttttaaaattttagcgtgggagagaagttataaagagaaagattgataaatttgaatataaaaatttaaaattgttataaagaaaaaattttttggtcgggtatagtggtttacgtttgtaattttagtattttgggaggttaaggtaggtagatcgtttgaggttaggagttcgagattagattgattaatatggtgaaattttatttttattaaaaatataaaaattagttaggtatggtggtaggtgtttgtaggtaggagaatcgtttgaatttggtggggtagaggttaaagtgagttaagattgtattatagtattttagtttaggtaatagagtgaaattttatttttaattatatgtatatttagaaatttttttagattagagatagatatgtttgtgtttatagataggaggattgttattattttttaatgggataacgtntgtaaatttagttattataatttatgtttatatgtgttttttattaaatttaaatatgtttttgtgggttaaaatttaaaaaatttaaagaaaatgtatagttttttttttatttttatattattgttattagtttttttttattgaggtaattaaatgattaatttttatatgattttatagtatattgtaaatattttgtattatatttaattttaacgtatttttttttttaaaatagttgattatggaagatttttataagagtattacgttagagatagtattttaatttggtttagtagtttagggagtttatattttttatattgtttaataggtaagggagggattggttaaaatattgagtttgttaggaatattttatatgtagattaatttcgttttagattgattattaatgtgttttattttggtttttgttttttgggttttttttttcgaggtagatttttgttttagttgttaaggttggagngtanngntatgatttcggtttattgtaatttttattttttgggtttaaataatttttttatcgtagttttttaagtagttgggattataggtatttattattacgcggggttattttttgtatttttaggaaaaaaggggttttattatgttggttaggttggtttcgaatttttgatcgtaggtaatttatttattttggttttttaaaatgttgggattataggcgtgagttatcgtgttcggttaaaaaattttaaaaattagttgggtgtggtggtattataatatttgtaggaatagttatttggttgaagtagtattattgtttgagtttaggagtttaaggtagtagtgatttataattatgttattgtattttagtttgggtgatagagtgagattttatttttaaaaataaaaaaaaaaaaattatgtatgagtgtaagagttttttaaagtgtatgatgagattaacggattttaatgttaatattatataaagtttagattgtttatggtaaatattttttaggaaattataatttgttgagttttgttgttgtattanggaatatattgaaaagaaaaggtttttaaaatattatatattttttttatttgtttatttatgggagggtagatttttttttttttttttaaataagatgagtcggtcggtatagtggtttatatttgtaattttagtattttgggaggttgaggtaggtggattatgaggttaggagtttgagattagtttgattaatatggtgaaattttatttttattaaaaatataaaaattagttgggcgtggtggtacgtggttgtaattttagttatttaggaggttgaggtaggagaattatttgaatttaggaggtggaggttgtagtgagttaagatcgtgttattgtattttagtttgggcgatatagtgatattttattttaaaaaaaaaaaaatttagatgaagtcggatattataatttaattttggataaatgttggaaagttttaatacgtttaaaaaattgaggttagatatggtgatttatatttgtaattttagtattttgggaggtttgtttgagtttaggagtttgatattagttagggtaatataatgagattttgttagaataaaaaaaaatgaattagttgggtatggtggtgtgtatttgtaattttagttatttaggaggtttaggttggaagattgtttgagtttaggaaggcgacgttatagtgagttgttattgtattattgtattttagtttgggtgatagagtgagattttgttttaaaaataaaaaaattaaaaatatttaaaaaaaaattgaaaataatttgtttttttaattgtaaaatattgttataatttgtatattatattgatgtagtttataaaaattaatattgtatgtatgttaagtgttgtatgtattaatttgtgaaatgagataaaattgaattatatagattttaaaatggtatatatttatatttgttattgttagtgatttttattttgttaaatcgaatggtttgtttttagtttttattttattttagtttgtaaatagtattggatatggttgattatttttttttttttagtatgttgtttttattagttttttatggatagtttaattatttggtttttttttttattggtgattttttagttttatttgttggttttttttttttatttagttttttagtgtttttgaggttagtttttagtttttttttatttatttttatgagtttatttagttttatggttttaaggattttaaaaagttagatttttaaaatttatgtatttagtttagatttttttttagatttataggtttgtatatttaatattcgttttaatgttagtagttgaatatataataggttttttaaatttagtatgttaggtagattagtaataaaataatatttttaagtaatgtgtattagtgtagaaatagggtggagaatgatattagagtttggtttttttaattttggtaaaatagtattgttttatttgggggatagattttatttttagttttgggtttgttatatttgatatttttttaataggttgggtttttggaataaatttttttatttttttttttttttttgttttttttttttagattttagatttaatgtataaatgaattggagtggtaggagatagattatttttttttaaaagtaaaaatttagttgtttttttttttatttgtattgtttattatgttaatgttagtttttttttagg

SEQ ID NO: 6 - DNA, 7450 bp, Artificial Sequence
  chemically treated genomic DNA (Homo sapiens)
  unsure (1729, 2292, 2294..2295, 2299, 2798)
tttaaaaaagaattggtattaatatgatgaataatgtaggtgggaaaagaaataattgaatttttatttttagaaaaaaatgatttgttttttgttattttaatttatttgtatattaaatttaaagtttaaaagaaaggaataaaaggaaaaggaaaaatgagaaagtttattttaggagtttaatttattaaaggaatattaaatatagtaggtttagagttgagaataaagtttgttttttaaatgaagtagtattattttattagagttaaaaagattaggttttgatgttattttttattttatttttatattgatgtatattatttaaaagtgttgttttattattaatttatttgatatgttaagtttgaaaaatttgttatatatttaattgttgatattgagacgaatattaaatatataagtttgtaggtttgggaagaggtttgggttagatatataaattttggaggtttagttttttagagtttttaaagttatgagattggatgagtttataggggtaaatagaagaggattgaggattaattttaggaatattaagagattggatgaagaggaggaattagtaaatgagattaaggagttattagtaaagaagagaattaaatgattgagttgtttatggaaaattagtgaagatagtatattgaggagaaaagaatgattaattatgtttaatgttgtttataagttgagataaaataaagattgagaatagattattcgatttagtaaggtggaggttattggtaatggtaggtataaatatatgttattttaaaatttgtatgatttaattttattttattttataagttaatatatgtaatatttggtatgtatataatgttaatttttataaattatattaatataatatgtaagttatagtaatattttataattgagaaaataagttgtttttaatttttttttaaatatttttaatttttttatttttgagatagggttttattttgttatttaggttgaagtgtagtggtgtaatgatagtttattgtagcgtcgtttttttgggtttaagtaattttttagtttgagttttttgagtagttaggattataggtgtatattattatgtttagttaatttatttttttttattttgatagggttttattatgttattttggttggtgttaaatttttgggtttaagtaggttttttaaagtgttgggattataggtatgggttattatgtttggttttaattttttaagcgtattaaaattttttaatatttgtttaaagttagattgtgatattcgattttatttgaatttttttttttttgagatggagtattattgtgtcgtttaggttggagtgtagtggtacgattttggtttattgtaatttttattttttgggtttaagtgatttttttgttttagttttttgagtagttgggattatagttacgtgttattacgtttagttaatttttgtatttttagtagagatggggttttattatgttggttaggttggttttaaatttttgattttatgatttatttgttttagttttttaaagtgttgggattgtaagtgtgagttattgtgtcggtcgatttattttatttaaaaaaaaagaagaaaatttgtttttttatagataagtaaataaaaaagatgtgtagtgttttaaaagttttttttttttaatgtattttntgatatagtagtaaaatttagtaagttatagttttttaaaggatatttgttatggatagtttgaattttgtgtaatgttaatattaaaattcgttagttttattatgtattttaaagggtttttatatttatgtatgatttttttttttttatttttggagatagggttttattttgttatttaggttggagtgtagtggtatgattataggttattgttgttttgaatttttgggtttaaataataatattgttttagttaagtagttgtttttataggtgttgtagtgttattatatttagttaatttttaaaattttttggtcgggtacggtggtttacgtttgtaattttagtattttgggaggttaaggtgggtgggttatttgcggttaggagttcgagattagtttggttaatatggtaaaatttttttttttttaaaaatataaaaaatagtttcgcgtggtggtggatgtttgtagttttagttatttgggaggttgcggtaggagaattgtttgaatttaggaggtggaggttgtagtgagtcgagattatgntnntgtnttttagttttggtaattagagtaaaaatttgtttcgaaaaaaaaaatttaaaaaataaaaattaaaataaaatatattaataattagtttgaaacgagattaatttgtatataaaatatttttaataagtttagtattttggttagttttttttttatttgttgagtaatatgagaaatgtgagttttttgaattgttgaattaggttgaggtgttgtttttgacgtggtatttttgtgggaattttttataattaattattttggggaaaaaagtgcgttaaaattaaatatgatatagaatgtttatagtatattatagaattatataaaaattgattatttagttgttttaatggaaaagaattggtagtaatggtatagagatagaaaggggattgtgtattttttttaaattttttgaattttggtttataaaaatatgtttaagtttaataaaaggtatatataaatataaattatgatgattaagtttgtanacgttattttattgaagaatgatgatagtttttttgtttatggatataaatatatttgtttttagtttagggaagtttttaagtgtatatatagttggagatggagttttattttgttgtttaggttggagtgttgtggtgtaattttggtttattttaatttttgttttattaggtttaagcgatttttttgtttataggtatttgttattatgtttggttaatttttgtatttttaatagagatggggttttattatattggttagtttggtttcgaatttttgattttaagcgatttgtttgttttggttttttaaaatgttgggattatagacgtgaattattgtgttcggttaggaggttttttttttatagtagttttaagtttttatatttagatttattaatttttttttttatagttttttttttacgttaaaattttaaaaaattttatagtattttttagtagtttattttttatgttaaaatgttttagttatttgaaattgataggtttgttttttatgataatagttgttattaattagttttttttatatttttttatttatcggttttagtattttgtatatttcgcggagaattcgtttttggttttttatagagtatagtattagggtgtagattattatatttatagagttattagttatttggtgtatgtttttttcggtagttattataaagcgtttaaattgtaggtgtcggttttttgtaatgtttttgattaaaaattttttaaagttggggttggggttaatataggttattttgtatttaggtgggtagaatttgaagttggttttcgtgttatagtttatttttagtagggagagtttttcggaggggttcgtaaatttttgtaggttattgaagagttttcgttttttgtttgttatttgttcgttgtatattatagtgaattttattaagaagtaggggaattattttttgtatatttagttttataagtttagaaagtttagtaggtataagggaaatgttaggatgtaaatggttagttttaggataaagatggtaagttttattgtttagaagggaaaaaaatagattaatagttagagattcgatttttttaattgtaggagagaggtttttggttatattttagagttaattagttgtagaggagaaaaagaattggttgtgttggaaagttaaattatgggtaagaggttaattttgtttaatagatgtttggtagtagtcgatttagtttagtttttataaggtaaaatgagaaggtttttagtttttttttagaaggaaagtggattataattttttatttttaatcgatttttgtttttttttttttgggtttggagatagttgttagttttttgttagagttttataagcgtagtgtatttatattttatcgggttttttagtgatttttaaaagaaaatagaattcgtgggtggagtttggttaaattatattagaagagtgttgttaaggtttttttattataatatattttttttatttttttcgtttaaattttgttttttttttttttttttttttttttaaaaaaaaaaaaaggaagtgaaaggatatgtatgttcggttatagttagtaagaatttttttttttatattttgggtagaggtttttagtgtttataatttaacgtttttgtaaattaaaaataatgttttaaggtttttaattatttgaatggattttttttttggttagggcgtttttaaaatttaatttgagagattgttttaggttatgaggggaagtgggggttagatatgttttattatattttaagtcggtatttatattaacgtagattttaagtatatttataatttattttttttgaagtttgttatttggaggttttatttgtataataaaattttagtttttataatttttattgtaatttagatattttttttttattgattttaggtttttagataaatttaattaattgttaattagaaaaatttaaaacgtatttataatttggaagttttttgtttcgcgtcgggttgttttgtttttttggattgaattaatgtattttttaaatgtatttgattgaagttttatgtttttttaaaatgtagaaaattaagttgtattttgattattttgggtatatgtttttaggatttttcgagggttgtgttataggatatggttatttatatttggtttagaataaatttttttaaatattttatagaatttgattttttttgttgatattttaaaattattgttttgggttgtatttttttttttaaaataatttttggtttaaggaagttagtttgtgggttgttttttttttaaaggataagttttagtttttaaaatgtgtttaattattcgattatttagttaatttggataaaaatattttttagaatatttatatttgggagttaaagggatttagaaaatagttttaagtatttattcgttttttataagaaagttcgaatttgggtatagtggtgggtgtttatggttttagttattgaggagttaagatagaagtatattttgagtttaggaatttaaattttgtttgggtaatatagtgagattttatttttttaaaaaaaaaaaaaaaaaaaagaaagaagaaaaagaaaaaggtttgagttttagggtggttagggaatatagaaaaaaataattttttaaaaatagtaaatatttattttaaaaaattgggtgatggatatagggagtgttttgttgttttatgatttgttataatttgtatgtattttataaatattgtatttattttatttttaatagatttttttaggtggaattgatatataataaattttatatatttaatgtgtatagtttgataagttttgatatatttatatatttgtgaatttattattttagttaagataaatgaatatatttattatttttaaaagattatttttgttttattgtgatttttttttttgtatttttaattttgaggtaattagtggtttgttttttgtttgtggtttgttttttttttttttttttttttttaaatgagtagtagtaagatttattgtgaagagcgaaagaataaagtttttatagtgtggaaggggattcgagcgggttgtttttttgtttgtttttgaaaataggatttagggaagaaattgagtaattttataggattggaagattttaaagtttttagtaaaggagaatgaaagtaattttgtagagaatttaattattttttttaaaatggagaggtttatggttataaagtttgtttgtaagaaaagtattaaagtaattttagatataattattaagaaaattaaaatatttttgggaatttatttggttggataattttgttatttatttttagttatagatatttttttttataaattagataattttattatttttttggtgatatattttttttttttttttttttgtatttattttttgtttttgtttagggaaatagtttgaatgttgtttttgaaattgttttttagaattgtgaaaataaaatagtattttgaggtttttagtaaaggataatatttgggttataaagtttagttgagatagatgaaattgaattattaggttgggtgtcgtggtttatatttgtaattttagtattttgggaggttaagtaggcggattatttgaggttaggagtttgagattagtttggttgaggtatgagaattgtttgaagttgggaggtagaggttgtagtgagttgagattgtgttagtgtattttagtttgggcgatagagtgagatgagattgttttaaaaaaataaaaataaaaaataaaaatgaaattgaatggttaatttaaataatggaatatttaatttttaaaaagttttataaaataaatgtattattgatatatataataataaaaattaattttatagattaaaggaagagagtatatattgtagtattttatttatatgaaatttaagtagatttatttatatagatattttggggttattgatttagaggttataaaggtgttttttagggatattggaaatgttttatattttgattttgttggaagttaaatagatatatatatatatatatatatatgtaaaaatttattaagttgtatatttaaagtttttgtattttaattatatgtaaatttattttaatgaaaagtaataagattttaagaaaagatataataggaataaaagggtatatgtatagataatatagaaaaatttatatgagaatattaggtataattttatgttaatatgtttgaagagttggataaattaattttttgtaaaattgaaaatattataattgatttaagaagatatagaatatttgattaaattattaattattaaagaatttaaattggtagtatgtatgtttttatttttatgttacgatttttaaagttattagaaatttgtatgtgaaagtatttgttaaagttttatagttgattataagttgttttttgaaaaagtttaaaataagacgataattgtttgtgaatgataaaatttttagggtagttatagttaaaaatacgattgataaatttgg

SEQ ID NO: 7 - DNA, 6212 bp, Artificial Sequence
  chemically treated genomic DNA (Homo sapiens)
gagagtatatagataagatagaggggaggaggtgggtattttttatatttttttttgtttgtcgttgttgagattgtagtatttattgtaatgtaaatgtattttgaaggtggggaggaatgtttaatttattatgttcgtgtgttattttggtttgtgtttttttttgtttgtagtaagattttgatgataattttgttttttatttgtttatttagtattttgtttttttttcgttaagttgttttatttttttaatgattatttttttattattgaggttttggtgaagttttttgtagttgttttatttttttttaacgatagtaataggaaatgattttttagtatcgatattttaatattaatttagggtagagatttttgttttttttttgttatagattaggaaattgagaattagggttaattttgattatatttagaggtttttttgttttttttttttttaataaggattttttatggtggttttagttttatttgtataaaggtattgagagggaataaaaaatataaagttgagaattttgagagagtttatttattttgtttgttggttagatttaaatgagagttaaaaaaaaaaaaaaaaatttgtatgtttgagtattattttggatgaatttagaaggtatggggtagagtttgatagggtttttgtgtatttattgggtattcgttagaggtaagggagaggagaggattgatagagtgttgtaaaagtatagattatttattgagataaaggatttggtttttttgttatgagtattaaaaaaatttaagtttttttaagtttgtatttttgattaaattttatataaaatattggaaggaggttgggtgcggtggtttatgtttgtaattttagtattgggaagttaaggcgggtggattatttgaggttaggagttcgagattagtttggttaatatggtgaaatttcgtttttacgaaaaagataaaaataagttgggcgtggtggtaggcgtttataattttagttattcgggaggttgaggtaggagaataatttaaattcgggaggcggaggttatagtgagttgagatcgtgttattgtattttagtttgggtgatagagtgagattttattttaaaaaaataaaaattggaagaagagtttaaaaaagataagattttaaagagttttaagttatttaagttgagtgtaattgttatttaaggaaggtaaatgagtttattattttttttaaagagtattttttttaattgttggataaaattataattttgttattttataaggaagaattttttaagaagtttttagaattagaagtaatgtgaatttttagcgttggttttggtgggtttgttgattatgattgggtaagtcgttttttttgttgttattttttttattataaagtgtggaatataggtaattgttttgagatttttggatagaagaggataatattttgtatttgtttttttttttaaatttttggggaaagatgagtaattttttttattattttgtttttttgtttagtaatttttatttttgtttgaagtaatagtattttttatttttttatttagagatttttgtgtgtgtgttattaaggttagtaaattttatacgtagtttaatatttaaaaaatgtatttattattttaaatttaataaattttagagtttattttggtttttttttgttgttttttttaaaaaatgagttgaagatgatagtatttttttttatatgtttggttatgatttttaaagttttatttaaataaatgttgaagtttaagtttaaagaagcgttgtagaggtttacggttttttgggtttcggttatttgtttatattttatatttgttgattgtgttttttgtattttatttaagttgagagtttaaatagttttgaaggggaattagttttaggatggaaggatttaggagaggtttcgaggtgggagggttttgtaaatatagattattgcgagtgtttagagttttttgttatgatatttttttgggattgatttggttgagaacgtgttttgttagaggatttgttagaattttgtttttttgtttgaaatttaaggttaaggagaatgataggagatttaggatagagttgatttttgtattaggttgggaggttgtagtttttttagatgttatttattgtaagtggttagaatattagagaggtgggttttatggttaaatgtatagtaggtgtttatttttatatttggattattttgtagtttttaaatttttggtttttgaggttaagtttataatttgttttttagttatttgtttgttcgtagtggtggtggatgtgttagttggtagatttggaattagttattagtttttttgtattgttttggttagttttatataagtaggggtagtttagttttgaggtttagagatttgttgttttttttttttttgagggaggaaataaaattgcggaatataatgtttttttatagtatgggaagaagaaaataaatattttttttttaatagttgtgatttgtgtgtgtcgtatagaatatttttttgtgggagtggtattgggtttttatttttagttaggggaatttttgaagtgtttgagttaggtttttataaaagaatggatgggataggttgttatgggagttatttttttatgatttttttagtgttaaaattggggtagtgttattttaatatttaattatttgtatagttatttgttaggaggtattgtttatagtaaaaggagaatacgttttgtgggtttttagttttgtttttggaagatatggttaatggtttaggtatttttattgtttttgtatggaaaggttagaaaatttttgtattttttttttttttaaagatagggttttgttttgttgtttaggttgagttgtagtgttgtgattatagtttattgtagtttggaatttttgggtttaagtaatttttttatttcggtttgagtaggtggggttataggttggagttattgtttttggcgttaatttttgtatattttaatatttacgattttttaaggagaaagaaaaaatatatttttattttagtatttagtatgttttgtgtatattagttttaaagttgttggttttattttattaaataataatgaagagttttttgaggtagtaggaggatgtgatggagagtggtagaagttagggttaggagatttgagttttatgaatagtggtagtaatagtaattattattgggcgtttatatgtattaggtaggtattgtgttaagtgttttatatgtatgattttattttatgaggtaaggatatttattagtagttttattttataaatgaggaaattgaggtttagagagtataagttatttagttaaaatgttttagttaggatttttttggatgcgttttttaaaatttgttttttaatttttattttatattttttttattgggagttttgtgattttgagtaagaagttttattttattgggtttcggtttattattggaaaggatttgtgggcgaggttgaatgagcgtagtagatggtttgtggttatttagagtagtgtttttttggttgtttgatattatagcgtttatatttgtgtggtttagtgaaatggaggcggaaatttaaagtttttatttttatagggtttgattggaaggggttgaaggatgatggggaggttttttgtatttttaaaatagattatttttttttaacgtataatttttagtaagtggtcgtgggtttttaagcgttttttttttttgggttatgggcgtgattgttgaaaagcgggttaggtcggggagtttagaattcggagtgaattcgaattattttagggagacggtagcgaagaaaattttgtttttaggagaacgtaattttcggatattagaagtttttttatgatgttattttgtggtagttttgtatttgagtcggatgaaaattgtaaaaatttaggttgggcgataggacggcgcgttttttcggtttttttttagagtttaggaggagttatgtagatttagtcggtttttgggggtaggtggataggttcggcgcgttttttcgaggtttttttaatttttcgggggtagtagcgtcgtgtcggttatgaatggggtttttggaaaatttaggtttggaataggtaatttttcggttttcgtaggttataaattattattcgtaatcgaaggacgcgtaggttgggagcggcggcggggttattagtgcggatttttattgagggcggcgggattcgatcgtaagggttggtttttgaggttattaaggggtgcgttgggttaaggtcgtttgggggtaggagttagcgcgatcgtggcgggttagtaggcggggttggttgaggattagtagcgattcgagattttaattttttttacgcggatttcgggattttttttttagtagtcgtttatttagggttttgagttaataagagttcgagatatatatgatttatcgggtttgggttaattattttgacgcgcgtttttcgttagtatttcgcgcgataatttggcgttttcggtttttataataaaaatttttcgtcggaaaacgattttttttcgtttattgcgttgatatcggaagcgaggcgtgtttgggagattatttcgcgtttcggcggcgaaggaaagaacggattttgattatagaagtttagtaaagtagtatattttttttttttcgtgaggttataagaataaattttttttttcgttatagttacgttttgggtataaacggttggggcgttaaagggagggagggaagggagcgggcgggaggagacggttacgtggtcgcggcggaaggatgcgtttgtgttgcgtttttatagagacgaagtttataaagggtcggcgggcggttacggtagttatttttattttgttcgtttatagatgtagttttttttgcgcgtgtgcgttttttttttttttcgtttttagggtttacggttattatggcgtattaggggtagtagtgtttgcggtagtattggtttttgtagcggcggtagtagtattaggttttgtagcggtaatttttagcggtttaagttatggcgtgagtatcggggcgggtcgtttagttgtgtttttggggtcggcgcgggttttggattggtggggtgcggtttggggttagggcggtgtcgttaagggggaagcgatttaacgagcgttcgggacgcgtggtttttgtttgggtgttttcgagacgttcgcgtgtttgggatcgggaaagcgtagtcgggtgttcggattgtttttttaggagttttatagttttcggatttcgagtttcgtaagggttttaggggttttggttgttgttttacgaaacgtggtaggaattaagatggcggcggtagggcggcggcgcgggcgtgagttaagggcgggcggtgggcggggcgcggtcgttttggtcgtatttggacgtggggacggagcgttttttttttggcggtcggtggaagaattttttggttttcgtgagcgtttattttgtggaatttgagttgtaagtagggaggggtaaatataattgttttgttttcgattttttagatggtcgatttagagaagtttcgttttataagtggaaggatgaaatttttagaatagttaatttttaatgggagttggtttttgatttttatttaggttttttacggtatttagtagtagcgttgttgtaatcgataaagatattttcgaattaagtatatttttcgattttagtaaagtatcgtaatatgatcgaaatgagttttttgagtagcgaggtgttggtgggggatttgatgttttttttcgattagtcgggtttgggggttgaagaaagtttaggttttttagatgattatttggaggtggttaagtattttaaattttatgggttttttagcgataaggttaaggcgggttttttcgaatggttggttgtggatgggttggttagtttttttaataatagtaagggtgagtgggttattattatatcgttttggtgggatttagggttaggggttttttatttttgtatttgatttatttggttttattatttaaatgttttgtaga

SEQ ID NO: 8 - DNA, 6212 bp, Artificial Sequence
  chemically treated genomic DNA (Homo sapiens)
tttgtaaaatatttgagtgatggggttaagtgagttagatataaaggtaggaggtttttaattttagattttattaggacgatgtggtggtggtttatttatttttgttgttgttggagggattgattaatttatttatagttagttattcggaggagttcgttttagttttgtcgttggagaatttatgaggtttgaagtgtttggttatttttaggtaattatttaagagatttaggttttttttagtttttaaattcgattggtcgaagggggatattaagttttttattaatatttcgttgtttaggaagtttatttcggttatgttgcggtgttttgttggaatcgaggaatgtgtttaattcgaaggtgtttttgtcggttatagtaacgttgttgttgaatgtcgtgagaagtttgaatgagaattagaagttaatttttattagaggttagttgttttgagaattttatttttttatttatgaggcgggatttttttagatcggttatttagagaatcgggaatagggtagttgtatttgtttttttttgtttgtaatttaggttttataaaatggacgtttacggagattaggggatttttttatcggtcgttaagaggaaagcgtttcgtttttacgtttaaatacggttagggcggtcgcgtttcgtttatcgttcgtttttgatttacgttcgcgtcgtcgttttgtcgtcgttattttggtttttgttacgtttcgtggggtaatagttaagatttttgggatttttgcggggttcggggttcgagggttgtagggtttttggggaagtagttcgggtattcgattacgttttttcgattttaggtacgcgagcgtttcggggatatttaagtaaagattacgcgtttcgggcgttcgttaaatcgttttttttttggcggtatcgttttggttttaggtcgtattttattaatttaaaattcgcgtcggttttaggagtatagttggacgattcgtttcggtatttacgttatggtttaagtcgttgggggttgtcgttgtagagtttggtgttgttgtcgtcgttgtaaaggttaatgttgtcgtaggtattgttgtttttaatacgttatggtggtcgtggattttgagggcggggaggagggaaaacgtatacgcgtagagaaaattatatttgtgggcgggtaaagtagaaatggttgtcgtggtcgttcgtcggttttttatagatttcgtttttatggggacgtagtatagacgtattttttcgtcgcgattacgtgatcgttttttttcgttcgtttttttttttttttttttttgacgttttaatcgtttatgtttagggcgtagttgtgacgagaaaaggagtttgtttttatggttttacgaaaggagagaggtgtattattttattaggtttttatgattagagttcgttttttttttcgtcgtcggagcgcggagtgattttttagatacgtttcgttttcggtgttagcgtagtgggcggggaaaggtcgtttttcggcgaagagtttttattgtgaaggtcgaggacgttaggttatcgcgcgaggtgttggcgaagagcgcgcgttaaggtgattggtttaggttcggtgaattatatatatttcgagtttttattggtttagggttttagatgggcggttgttgggagagggatttcggggttcgcgtgggaagggttggggtttcgggtcgttgttagtttttagttagtttcgtttgttggttcgttacgatcgcgttggtttttgtttttaggcggttttagtttagcgtattttttagtggttttagggattagtttttgcggtcggatttcgtcgtttttagtggaggttcgtattggtggtttcgtcgtcgtttttagtttgcgcgtttttcggttgcgggtggtgatttgtggtttgcggaaatcggggggttatttgttttaagtttgagttttttagaggttttatttatagtcgatacggcgttgttgttttcgggaggttgaaggggtttcgagagggcgcgtcgggtttgtttatttatttttaaaggtcggttgagtttgtatggttttttttaaattttggaaaggagtcgggaagacgcgtcgttttgtcgtttaatttgggtttttataatttttattcggtttaagtgtaaggttgttatagaatagtattatagaggaatttttggtgttcgaagattgcgtttttttaagaataagatttttttcgttgtcgtttttttggggtagttcggatttatttcggattttgaatttttcggtttaattcgttttttagtagttacgtttatggtttagggaggagaggcgtttgggaatttacggttatttattgggggttgtgcgttgggaaggggtagtttgttttaagaatataagaaatttttttattattttttagttttttttagttaggttttgtgaaggtggaaattttgagttttcgtttttattttattgggttatataagtatgagcgttgtgatattaaataattagggaagtattgttttaaataattataggttatttgttgcgtttatttaatttcgtttataaattttttttaatggtaaatcgaggtttaatgggatgaagttttttgtttaaagttataaggtttttagtggagggagtatggggtaggagttagaagatagattttggggagcgtatttaaaagaattttggttgggatattttggttaaatgatttatattttttgagttttagtttttttatttgtaaaatgagattattgatgagtatttttgttttatgaagtgagattatatatgtaaagtatttagtatagtgtttgtttggtatatgtaagcgtttaataatggttgttgttgttgttattgtttatagaatttaggttttttgattttgatttttgttattttttattatatttttttgttgttttagaggattttttattattatttaatgagatgaaattaataattttaaaattggtatatataaggtatattggatgttggaataaaagtatgttttttttttttttttggggaatcgtgagtgttgagatatatagaagttggcgttaggagtagtggttttagtttgtagttttatttatttaagtcgaggtgggaggattgtttgagtttaggaattttaagttgtagtgagttgtgattataatattgtaatttagtttgggtaatagagtaagattttgtttttaaaaaaaaaaaaaatataggagttttttagtttttttatgtaaaggtagtaagaatatttgagttattagttatgttttttaaaggtagaattagggatttataggacgtgttttttttttgttatagatagtattttttgatagatgattgtgtaaatggttgagtattaaagtaatattgttttaattttgatattgaaaaggttataaaagaatgatttttatggtagtttgttttatttatttttttatagagatttagtttaaatattttaaaggtttttttagttgaaaatggagatttagtattatttttataggaaaatgttttatacgatatatataagttatagttgttggaaaggagatgtttatttttttttttttatgttatggaaggatattgtatttcgtagttttatttttttttttaaggagaaaaaggatagtaggtttttgggttttagggttaagttgtttttatttatatagagttaattaagatagtatagaaagattggtgattgattttaaatttattagttaatatatttattattattgcgggtaggtaagtgattagaaggtaagttgtggatttggttttagggattaagaatttaaagattataaggtgatttaaatgtaaaggtaaatatttattgtgtatttgattatggaatttatttttttggtattttggttatttatagtaagtggtatttaaaagggttgtagttttttagtttggtgtaagggttagttttgttttaagttttttattattttttttggttttgagttttagataaaagggtagagttttaataaattttttgatagaatacgtttttagttaagttagttttaaggaagtattatggtagagagttttggatattcgtagtagtttgtatttatagaatttttttatttcggggttttttttgggtttttttattttgaagttgatttttttttaagattatttgaatttttaatttgagtggagtgtagggagtatagttagtaaatgtggaatatggataggtggtcgggatttaggagatcgtgggtttttgtaacgtttttttaaatttgagttttaatatttatttaaataaaattttaaaagttataattaagtatgtaaagaaaaatattgttatttttagtttattttttaggaagggtaatagaggagaattaaaataaattttggaatttattaggtttaagataatgagtgtattttttaagtgttaggttacgtataaagtttgttaattttgatggtatatatataaaaatttttagatggagaagtagaagatgttgttattttaggtaaaagtaagagttattgaataggaaggtagagtagtggggaaagttatttatttttttttaaagatttaaaaaagggggtaggtgtagaatgttgtttttttttatttaagaattttaaagtaattgtttatgttttatattttatgatgaggaagatggtagtaaaaagaacggtttgtttagttatggttagtaaatttattaggattagcgttgagagtttatattgtttttggttttgaggattttttaagaggtttttttttgtaaaatgataaagttatggttttgtttaatagttaaaagagatgttttttaagaaggatgataaatttatttgttttttttaaatgataattatatttaatttaaataatttgggattttttaaaattttattttttttaagttttttttttaatttttatttttttgaaatagggttttattttgttatttaggttggagtgtagtggtacgattttagtttattgtaattttcgtttttcgggtttaagttatttttttgttttagtttttcgagtagttgggattataggcgtttgttattacgtttagtttatttttatttttttcgtggagacggggttttattatgttggttaggttggtttcgaatttttgattttaagtgatttattcgttttagttttttagtgttgggattataagtatgagttatcgtatttagtttttttttaatgttttatgtgaaatttggttagagatgtaagtttgggaaaatttaaatttttttaatatttatggtagggaaattaaattttttattttaatgaataatttatatttttgtaatattttattaattttttttttttttttatttttaacggatatttagtgggtatataggaattttgttaagttttattttatattttttagatttatttaggatggtatttaggtatatagatttttttttttttttttaatttttatttgagtttgattaatagatagggtagatgagtttttttaagatttttagttttatgttttttgtttttttttaatatttttatgtaaatgaaattgaaattattataagaaatttttgttaaggggaaaagaggtaaaaagatttttaaatatagttaaggttaattttagtttttaattttttaatttgtgataaaagaggggtaggaatttttattttaaattgatgttgaggtatcgatgttaaagagttattttttgttattatcgttgggaaggaatgagatagttgtagagagttttattagaattttaatgatggagaggtagttattgaaaaaataagataatttgacggaaggaaaataaaatattgaatgggtagatgagaaatagaattattattagagttttgttataaatagggaaaaatataaattaagatgatatacggatatggtagattaaatatttttttttatttttaggatatatttatattgtaataaatattgtaattttagtagcggtaaataaggaggaatgtaggaaatgtttatttttttttttttgttttatttgtgtgttttt

SEQ ID NO: 9 - DNA, 15782 bp, Artificial Sequence
  chemically treated genomic DNA (Homo sapiens)
atagttgtaattagaaattaagggtttgtgtgtgtgtgcgcgcgtgtgtgtgtgtgtgtgtgtgtgtgtgtttgtaataaatatagtgtttttttttttttttttatattgtgttttcgtggagttatatttgtgtgtttgtgtttttgtacgtatataagttatatagatattgatatgtaggaaacgtgtattaaagtgtttgttttttgattttaggtaatagtataatgatttgaattttaggtagttgaaaggtttttgtcggtggaggttgaaataaataagaaaagttattgtggagatgtgaatggaaaagtatcgagtttttttttttttcgtatattttttcgttttttagttttttttgttatcgagttggttttagataggtttttgtatggttaggtgtataagagggcggtggggagaagaaaaaaaaaatgtaggtataatacgtaaattaagtttttttatttttagttttaggtagtagagatagttaagtatagtagttagtagttcggtaacggtagcgggtggattagttattttgagtttataaatatttaagtgtttttttttttttattttttttagagtttagttgttgtttttttttatgttaaggttttataggaagtgaaaattttgttatttaaaatagcgatcgaacgtaataaataaattattatatattttttaatttttattatttttttattttaagtttttgatatttatttttattttaaataagtgagaaaagtgtggaaaattagtgtttggggtaaattttgagttaggttgaaaaggtttttaaaggaaaaaaaaattttagaataataaaggttaaaagtaggtagtatatggatgaaaattaaatattgatattttttttttagaaggtagtagttggaaattatatatttttttaatgttttaaaattttttgtttattttgttatgttaaaaacgtttttttttttttaaggatattataaaaagtttgtttataatagttttaaatgaaggatttgaaataaaacgaataggtaaaatttaataagtttgatagatagtgttttttaaatttattaaaagtagtgttaagtattttaatgtagttgagaggtataaataaatttaaatgattattaaaatttattatgatttggagttcgttttgagttttgtagtttataaagagattatggtagttttgttttttttagttttataaggatataagatatatatttatagatttaagttgttagattatattgattttttaaaatgatagagggttagtaaattatgtagatttatttttagttgtgtttttggggttatatatgtttttagtgaagattagtttataattttgaaagaagaaagtttagagaaggtgattgatttgaaaaagtttttttagttttaaaatttttagttttatgatgtggtattttaaagatttattaaggtgttagaggtttttgataggtgaaattaatttttttttgtgagtttttttagaaagaggatagaatcgtgtttattttaaggataggtttttttttagttatgattgaattgtggggaaggttttgtaagggggaattggatgtgaagtttgtttttttttttaaatagatgtaatattaggattaggttattttattttgtaataaagtttatatttatttagtagtaatgattagggatttatttttatgtttagtttatgaggtaaagaggttggtttggttttttattgagtattagtagttagtaattattaaattatgggattagttgaaatgtagtgtttcgaagtttgtaggaattatttatacgattttagatatggaattattttttagagttttttaaggatgatttaaaagaattagaatacgtttaagttagttttttttttaattttgtaatacggtattgcgggagtgagggaggtttatatagtgatgttaattggatattgaggagaggttaagaatgaaagaagaaatgatattttggaagaaatttaattggtataatatttgataaagttatttttttaggaattgaaaagagattgagaggcgggtgtataattttttttattatttatttagtttaaagtaaaagagatttatcgaaaagtaagtgtttatttttagaaaatttttaataatgattttttttttttttttaattggttttttgttttggttaattttttttagtgtaaatatattgatttggtaaaaagtagtaggaaaatgtggtattttggtatttggttttagaaataatatgttgggaagatttgaggtttttggtgatgaggttaattatatatgaattagttttggtgggttttttttttaggggtttattgtagagaattaaagagggttgaggtatgagaagggtgaatttttttttagtttttattttggttggttttattattgttttagagagtagatttttttttgttttgtagcgtttttatggggttaagagtggagtggtaaagggaatataggagggataagttgtgttttaggttgaggggggcggtggatgaggttgaatggtagttttgataaagaaaaaagtgattaaaaattataaaaataattttttgagggtttaatagtaaggtagagttatataatttatattttaaattatatagatacgtttgagaaattttaaagtgttaattgtttataaaagaaaaaattatatatataaatatataaagaaaattttttttataaaatcggggtgttattttgtatttagcgggatttattttaatttttttgaaaatgagaaggaaggggatttaaatgaaaaagtagatagtttgttttttggtagaataaatttgaatttgataatattatgtgtttttgggggtaaaacgtatattttaataatagtgataggattaggtttatgtatattttttaaaaatcgtttataagataggtttttttgtagaggttgtagtaatttatttgttaataagtattaaaatatttagattttatagggatagatattttaacgtatattttttaagttttagtttttgtggaaaataattaatttttttgtatttttttgggttttaaaatttaaaatatagtttttaaaaatgtgtgtgtgttgtggggtaggggggtgtattgttaataatattttcggtgatagatggaattttttacgggattgttaatgaaagagattttttaaatattttagtaaatagtaattttttatagttttgattatttttttattataaatttaaattttgggttgagataggtagattattttagatatatttttattagaaattaataagtgacgagattttgtggaagttttaagaatttatttgtaatttaataagtcgtttgaaggatttttatagttaaggtttagaatagtttgatttttgaaagttgtttttggtttaaatattttgggttaatttttgaggaatttgaaatattattttttttttatattttttttttaagagagagatataaaagaaataagagttttttttatttagggatgagtaggaggggaaaaaattcgaattaatatttaaataaggaaattagtagttttgaataaataaattaggatttataatgaaatgattttgtattgtaattgtttttaaaaagaaagtaatagagaaaaagagaaggaaagaattttttttttttttttattttttttttattttattttttaatttagttttaaagttaagaagattgtgttgcgtgtagtgtattgtagttgtggtagtttgttttaaatataggtagtatttgtgatattggtacggtaggtttttagaatttttttcggttgattttttaaatatagattgaagagatttttttataacgattttgaaacgagtttcgaaaataaaaattttaagattttaagagaaaataaaatataaataggtatttggtttatagaattttgtagaaaatatatatatattatttcgttatttttatttttttttttatatatacgttttttgtaataagaaattttttaagagttaataataatagattaaatttattatttgttgttttggaaagaaataaattaaattaaaataaattttttgaatatttttttgaagtgtaggagagatatattttagtaaaagtttaagggggaaaaagaaaattgtattaaaggaaaaaaaaaaaaaaaaagtgggggttgggattgttatatatggttaaaaatttaagttttttttaatagtattagtattgaaataatatatttttaaaacgtttgagggattagatagggaaagaaaaggtacgtataaaaaaatttaatcgatgtcgattttgtgatttacgtaatattataaatttgtaaaaggtaaaaaattagaagtaaaaatttataaattattaaaatatagaaattaaaaattttaagttattatattagaaagaaaaaaatttagaataatagtaaaaatttttgttttaaataaaaataaagtaaatgaatttatcgaaaattgtttggtaaatatttttttcgtggtgtttaatattttagttggaaagagttgtgatgtttattttattttattttttttttattcgtttttttaattttattatatatataatatattttttttagtggtttaaatttttcgtttttttttgtgtatttagttcgatttgttgagtttatgggtaagaaagaaggaattagttttagatttcgggaaagtaaagcgtatttttttttttatgttatcgaatagtaaattagtttttagaattttagaggtcgagttttgttatagcgaaggcgtcgacgttatagaggaggagtttacgtgatggtggcggagtaggttatattatcgttttgggttcggggagggagagttatttttaggtttttcgagtttcgaatcggaatttttaaattcgagacgttttgtttatgaggatttcgaaatatgtcggttagtgaaaaaattttgtggttttgagggtttttggttggttaggggtagtaaaaatttcggagagttgatattaagtttttttttgttacgtagtagtggtaaagttcgaagtttaaatttcgagaattgagttttgttgatttttagaattggggtttttagaagtggtgatgtaagaagtttttaggaaaggtcggatattaggtgattattgttgttgttgtcgtcgttgttgttgttattgtcgtcgtcgtcgttgttgtcgttggtgtcgttgtcgtcgtcgttgtttatgattattattttattttttaatttttttttttttcgtttttgttaaatgttttggttttaagttttttatgtgtatttattgatataaatgtatatatttatttattttagttgttaggtgttaaaataaatgtcgaagattagttttacgttttttttattataggatatagattgttatgtatttattattattattgttgtttttgagtgaatcggtcggtttggggaggtttttgttatttttttttgtgttgttttggtttttggaaaggaggtggaggagaggaaggaggggaattagggggcggtcggagtagagaggacgagatagtgtttggggggtgattcgggttagtttgggggttgtttggttttagatcgcggagaggacgcgcgttcgcgttttcgttttttttgttgttgtttgcgtacggtttgtgatttttttggattcgtgcggttgtgtttttttttttttttttcgtttgtaaattgttttttttgtttcgtcgtttttggttttcgtttttttttttttttttttttttcgtttttttttttttttttttttttgtttttttgggtaatttcgggaggtaaaaagggaggttgttcgttcgttcgtttcgttggtttttttttatcggtttcggttttttagattttttgttttcgagtcgaatcgagatttggaaggaaaaaatgtaagcgaattttttgggtttttgtttttgtttttttggttataaatttagatgagatgaagtatcgtgtttattatttttttttagagtcgtgatttttttaatgagagtcgagtgttttggtgttttttgtttttgtgttttggggagtttgggggcggggatgttgaatattttgaaaattatttttttttggttgtagtcgagggagtcgggaattttcgcgcgttttttttgtttatttcgaggagagagattgatggcgggatagggttttttggggtgggtgggaaaggggtgcgtattgtatttgcgatgttttttagtgtgcggggggatttagggaatttcgataggatagtttgggagaacgagaaaggtggcgggatttttggtcgttgcggtgtttgtattttgggcgttgcgtgattttgtgttggtttttaatggttgttgttttttttttttaaattttattttatttttttttatggtgtaagttttgtaaaaagggaattgcgggtttgagcgtagtggacgttaggttttagattttcgaggtttttattttgggcgaggagaaagacgaatagagttttagttcgcgttttttatgtgtaagatttaggaggagagaagggtattttgtggtcgtggttgaggggattcggcgcgggaggagcgggcgcgggcgcgaaagggagatttttgtgagtgattttgtaaaaatagattgcgaggttggttggatttgtaatttgtggtttttttcgagggagtaagaatgggggaaggcgcggcggcggcggttcggggagggagtgggtagagttggagttttagaaatcggttgagtttcgggggcgggcggggagaaagggcgggggggtagtaggagttaggggttatttcgttgtcggatgtagtgatcgtggtaaatgttttgagaattgtgggttgcgttgtttttatgatgtcgtgttattggaattttggcgaaaaatggaattagtgttgtaataatgagttttaaagtttttttatggaaaataaaaatataattaaatcgattttttaaaaaaatgaaaaaagattttttgtgttgtgtttttttttacgatggttgtgttggtggttggggtttgggggtgggggggttttgatagttgagtagataaatgattttaaattaggtgttgaaagttttaagttgttatagggtttttgattattttagagagttaatttttatttcgcgtttttttttcgtcggttttcgttattttataattcgttaggatttaattttttatggattttttttttagtttatagtttttaggaggaaagttttgtaacgttttatttttttttttttttttttaaagtaaagtgagtgttagtagatgtgttttttatagtttggattttaaaaaaagtggggtaggagagagggaattagggaaagggttgtttagaaatatagtttgtggttttgagcgatgttatcggttttttttatagagattgttagtttttttttttttttgtaaggtgtgtgtggttttaataaataatttaaaaaaaaaaagagggggcggtaagatttattaggagataggtatttattttgtttattatttattattaagagtttttggtattagaatagaatttcgtaaatttgtagtttaagttgaagtttatttggttttagtttatacgttatttttggaggtagtaaatatgagtttaaagaagagagatgaaattatatttttgttttaaaatatatatttttttaaaaaagacgaaaagatatttgtttttgggggaggaggaaatggcgaataagtattaggagatgggtatttttttattttaatgattgtagttgagtttttaggttaaaatagaaatttgtagatggtaattttttttttattttttcgtttcgttcgttattttaagtttataaatagaagtttttagtattttatttggaagattttttaatattagaggtcgaagtattggttagttttaagggttgttgatagtgatagtaaggttagatgttgtttataaaaattgggcgatttgaaggagatagttagaaaaagtgggaattttttaattgttttttttttttttttagttttgaagggttttatattaatgtttttttgaaaagattaatttattttgggtttggtggatagggatgggattttaaatgtttaagttgtcgtttgttgagtttttgaagagttttagttattggttgagtaaatggtagttacggttagatgttaaaatttttttttttttttattttttatagggtaatgatatttataatttattttgttgtgaaaaatttaagagatatagaggaggcggtgtagtagcgttatttttcggtgggtgaaattattggtaaaagttaatttttgaaaaatattgggaagtgaatttatgaaatattttttttttagagatttaaaaaaaataggggagataaaattaacggataaaaaggattttgaagtttattaagtagggaagaaaaatgttgttttttaattaggatggtgttataataggtaacgtggttttaaggtttttttttttggtggggggagggtgtttggttgattttaagtagaagagttttttaggcggaggtagttcggttttttttttggattgattttttagggtattttaattttgttgtttgtttgatatcgagatagtgagggatgttttggtgtaaaatattatagtggttggaaatgttgtagttttgtcggcggtggtaggacgtatgtgtagggggtgtgttgaggaggtttgtggatggcgtggagtaatggtaggttggtttgtagttttttgtgaattaatatcgaatggcgcgtgtcggtttttagtattgcgtaataagtgggatcgtcgttgtcgtcgcgagtatagcgagggtgtagcgtggtggtagaattggttggtttttttttgttttagtggaaattaggaacggttttttttaattttttcgatgtttatttcgagatttataattttattaaaagattatattcgattttttattttttcgttttgttaggcgtagtgagtttgagtgggatttagtattcggtttttagcgtttttttttttcgagaagattaggagtttattttcgattttttttgttggatgattagtgtttggtaagaatttttgttaatattgtcgagtgttattttgttttttgaagataagtgtattttttttttttttttagtatataaagtttttcggaggttgggggagaaattaatttatgatatatgaaattagttttagatatcgcgttgtggttgttagaggcgggagtatcgggaggaacggaattatatatattaaattaaatgttttttagttttgtttttagaggtaattatatttttaattttcgtttttattagatagaaaataaagaggggcgggtagggatcggtgtggaagttgcggtcgcgcggcgattttcggacgggttggtttgttatttagcggtgggttgagatcgagttcgcggttatgggcggtgggttcgtcgttttatttttcgggcggcggtattttgattagatgttaggattgatagaaggagggtattttttaatggggatggtatataatttttaaagttttggtaagagggatgaaaattagaaaggtttcgttgtttgtttattatttagcgatgagtatttatttgtattaagaaaaattataaataattcgtttcgaatatattatttttttgtttttgtggttttttttaggggaagtcggtagtggaaggatgttatttaggagtttaggggttttgggacgtataattttgttttgtagttgaggaaataggttcgacgaggaggtttgttagtggtgagttagtgatttaattaggattagattttaagtttttgaattttatgttagtgattgaaagttaaaggcgggtttattttagttttttagaagtatttatgagaaaggagcggttgttagaattatgagtttaattttttaggttatttttgttgttagtgtttattggaaatcgttttttagtagttttggaggattttttttaaagaaaatatggtttaagattttcggtaatgatacgaaaagtttagatggtgttgaagggtgtgggtttcggagttcgggggtttgcgtgttaagaggggggttaaggtttggattaaagatttgtagggcgagtttcgattttgaaatcgttttttttttttttttaatattttttgtatagtagtttggcgagaaatcgggtgtgtgtgtgtgagggggtgggggttatgtggataggttagaatttgtgttataatagttttttcgtaaagtttttttttttcgagttcgtgatttaagatggtaaacgcgcgttcgtatgttggcggtttttagcggtagtaggcgcgttttgtagggggagatagcgtcgtcgttttcgttcgggtcggcggggatcgagttcggttttttttattgcgggagtcgtcggaggtcgcgtcggagaaacgcgtttttgttcggattggaaacgaatttgggaacgagtttgaagcgcggttaagtttgatttatcgttttttaaggatagttagtgttttttatttttattaacgtgaataaggattttggttgatttttttttagatcggatttttaaaggtattgtttgtttgaggagattatgttttttttttttttcgttagtttttttgtaaaggttgagtttagtttagttaggacggtcgagggatttttgtttcgggacgcgatttgttggtattgttttcgggtttttttggaaggttgtttcgcgttgagcgtatggggaacgttttttttgtaatttttttttagattttgatgataaaatatatttttttgttttattgtattttttagaagtttgtaggtttgtaagagtattgttggtaggaaacgtgatagaaatgaaagttaggatataatgttttcgaatatttcggttatttaaagcggttgtcgaggttatcgcgttattaaattcgtttttatttattgtcgttttttgtattttttcgttttttagttaagagggcgaagagtgtttttttttaagaataaaaatagtttcgcgatttgattttattttttgtcgtcggattacggtggtgtttgtagtcgtgtagttagttggttgaaatattgttgagatcgggagttttacggtagggtttttgatgcggggtttattacggtagttgtagttttattaaaattttttgtttttgtttttaaatagtgttttatatttttagatttttttttggattttttagcgggttattggagttattagattattaataatttaatagtttttgtagtttttttggttggagaggaggggggaagggcggaaggtattttttaaatcgggaggttttggttaaattaggttaatgggaaggaggggaggggcgagaaaggggttgacggttttaaattttgatggagggttttttttagcgttaggtagcggtaaaaatattattcggtttgagttttcggaattacggaatttttaatttttaataaatgtatttattttattttaattttttagatttttatttttattttttattaaattttaatcgttttttttatttttattttatcgggcgaaggggtgagaaagttttaatgtaggattttgaggttaaaggttcgttttttgtagatcgattttgattttttcgtttgtcgtagaagggatgagcggcgtagtgtgacgttattggttagttttaggattagattgcggtttttgtggttgagtttttcgttgttttttagttttcgaaagcgtatttcggagtttgttatcgagattaattaggatatggtattcgggggttataattttcgggagggttataggaaggcgaggtaattttggagagtgttagtgcgcgcgtaggggtcggggtttcggtttttgtcgagtttaagttgtgtttttacggtttcggggaaatcggattcggaaatttttacggtttggtagtttttgttttaaagattttgggcggaaattaagtggagttgggttttcgtttttgttaacgtaggcggaaggggttttttgtttagtttttttttaattttgtttggggcgtttatgatggagatttttagtttttagggattttattttttgattttgaagtttcgtttaaatatttttttaaaagaacgggggtgagggagaatggaaggtaaaaagagggaaaaaagtaaataaatttcggaatcggataatttaaagtttcgatatgagtttcggattgtattcgaatttttgggttttagatttagttttgttattaatttgtttgattttttttatttataaattgttgtgggtgagaggtgggattaggtgaattttgagagttttgtattcggcgcggacgagggatttaggggaaagtgtgttgtatttttcgcgagttttttttagcggtttcgtttttttgggtgaattttcggcggttagcgtagcgtaggtagcgattttggcggttgtcggggtcggtagttttttggaaagttattttttgttggagtcggtaataggtaaagtgtgttttgtgaaattcgtagagtcgagattgattacgtttcgggaatgagagggttgtgttattttttttattgtttgttgtattgacggcgtaataggaaaaaaaaaaaaaaaaaaaaaaaggtatatatataatgttagttatcgaggtgtattaaaagttttatttgaatgtaattaaattaagggtcgttacggttatattataaagttttcgtcgcgttttgcggggggtttcgaggtggatcgtttaggggcgggtagtttttggaagataggtacggagtggtcggggtggggtagcgaagtttgtttaggtttgtttcggcgcgtagggttggtgtttgtgtttttatgtgtgagcgagaaaatggggttttttggtgttagtttaggggaggagggaggaaaaggatggggttttttgtattggtttgttttttggtttttaatttcgtttttttttttttttttattttttttttttttttttttttttttttttttttttttttttttttttttttgtcgtttttgttgttttttttttttttttgtttttttttttttttggtttttgtttttttttttaatggaaagtttttttaaaggatttgtttttttaaggagtttagttggttatgtataaggaaagcgttaaaagagttaaagggaggaagggaagagaaaatatttaatttttttatggtggttattgatttagcgtgggtgcggggagattgggatgggaagtttaggtttgggggtagttagtagttgttagttttttattgatagttttgttttttggagattgtttttgtgggtagttttgtgtgtggtattggtggaatggttgaatttaggagacgcggcgtgtttagaatttgttggaaattggttttgagattttgggtaaggttttttattcggagttttagttttttttttaataaagtagggttgttataaggataagatgtaattttgagggggtgggaaaggattaagagttttgtaaaaatataaattaaatgttggtggtgtttttatatttgcggtatttggggtgggggtggtgataatattgtttatatttaatttatatatttaggagttggggggggttggtttttaagacgagttggtttgtaaaggagtgaatttgagaaggatttgcgtttcgtgtatgtatatttgtttttggttaggtagaggtttacggtgaaaagtttaaggtttagttgatagtggatataggggaatttgtttgtttgttttaattcgtatttggagtgagttattgttatttgttatggtgaaatggtaaatttgggttttttgtggttttagaagtttgcgattggaaatttataagcgagttggtggttgaagttggttaaagaatagtttaggtattttagaagtgtttgaggattttttttatgaaggaagagaggaaagtttttaagtaaattttttatttttatgtgtttttagtttttttttgtaaaggagaaaatttttgaagtttggtaaagatcgagttagtttatttttttttgtttatttcgagttgggttggggagaggaggagataggtttttttgtttttttttgtttttttttttttttatttttttttttttagtttttatttatttatatgtatatattaattttggagtcgatgggattgagtgattggtatttgggattatagagaaatgttagagtgtttggttatagatttaaggaaattttttattttagagtgtttatttggtaagatttagtagtttggaatggggtaaagtgtttgtgtgggggaaggaatttaaaaatgagatttatttatattagggtgttgttttgtatgttttatagtacgtaggttgatttggaaaggggataggaatttgagttagaagatttagggtcgggttattaattatgtatatggtttaatatgattttgttggttttaggtttttttatttagaaaatagttttaaaaggttttgtttttttttttttaaaggggggaagatagtttaaatattgttttattttgtagtttatatttgattataaatgagggttttatatttgtgtttttaatgattttgttttagagaagtcggtttggaaggaggtatatattttattaaatttttttaaggtttagtgttttttggttagtttttagttaaattatatagttaagttttttattagtagggagaagtataaatttagaagtaatggtattttgtttggttttagatttagtagggaagggagagaatattttgaaaaagaagataaaggtttttaaggaatacgtagatatgatattttaggttgtgttttgtagagtttatatttagttttaatgttttagatgggtaggaaatattgtttagttgtttgttttgagtaagttatttgaatttttaagttttagttttatcgttagtgaaataaggataaagatattggttttatcgtttttgcggaattattttaaggtttgaaagataatattttagtaggttttgaatgacgtttagtggttttaggttacggacgaatcgttattgttaatgttgatagaattattttttttatttttttttttttataaattttagtggtttttggatagtataaattttttttttgaagaaggaaatatatgtatgtatgtatgtataattaattaatgtatgtaattgtatttttagtattttggataaaaatattattattttatagtttcgggtgtttgttgttttcgtaagagtagagttggaaaatgtttgttagtttgtggtaaaattatattagttggtaagttgtaattattaaagtaaaattaaatgtgtatgttttaaaataagattatagtggataattttatattcgttaaattaatttttgtttgttttttttttttttttgtagg

SEQ ID NO: 10 - DNA, 15782 bp, Artificial Sequence
  chemically treated genomic DNA (Homo sapiens)
tttatagagaagagaagaaagtaaatagaaattgatttaacgaatgtaagattgtttattatagttttattttaggatatatatatttagttttgttttgatagttgtagtttgttagttggtgtggttttattataagttaataaatattttttagttttgtttttacggaaataataggtattcgaagttatgagataataatgtttttatttagagtattgggagtataattgtatatattaattagttatatatatatatatatatatatttttttttttaaagaaaaaatttatattatttaaaggttattagagtttatgggaaagaaaaaataagaaaaatggttttgttaatattaataataacgattcgttcgtggtttaaaattattggacgttatttaaaatttgttaaaatattattttttaagttttagaatgatttcgtaaggacgatagggttaatatttttatttttattttattggcgatgaaattgagatttaggggtttaagtggtttgtttaagataaatagttaggtagtattttttgtttatttgaaatattaagattgaatatagattttgtagaatatagtttgagatgttatgtttacgtattttttgaaaatttttgtttttttttttaaagtgtttttttttttttttattgggtttaagattagatagaatgttattgtttttaagtttgtgtttttttttgttggtaaaagatttaattatgtgatttagttgagaattggttagggagtattaaattttgaagagatttaatgaaatatgtatttttttttaaatcggtttttttaaaataaaattattaaaagtataggtgtaagatttttatttatgattaaatgtgggttgtaaaataaaataatatttgaattgtttttttttttttaaaaaaaaaaaagtagaattttttagagttattttttgggtaaagaggtttgaggttaataaggttatgttgggttatgtatatggttggtgattcggttttaggttttttggtttaaatttttgttttttttttaaattagtttacgtgttgtagaatatgtaagatagtattttgatgtgggtgaattttatttttaagtttttttttttatataaatattttgttttattttaggttgttgagttttattaaatgagtattttaaaatgagaggtttttttgagtttgtaattaaatattttgatatttttttgtggttttaagtgttagttatttaattttatcggttttaaggttagtgtgtgtatgtgagtgagtggggattggagggaaggaagtggggaagggagaagatagaaaaagataaaagaatttatttttttttttttttagtttaattcgagataggtaaagagagatagattaattcggtttttattaaattttaaggatttttttttttgtaaaagaaagttgaagatatatgggagtgggaggtttatttaaaaatttttttttttttttttatggaagggatttttaaatatttttggaatatttaggttgttttttaattagttttaattattagttcgtttgtggatttttagtcgtaggtttttggaattataggaagtttagatttgttattttattatgataagtggtaatgatttattttagatgcggattgaaataaataaataaatttttttgtgtttattgttagttgggttttgggttttttatcgtaagtttttgtttggttaaaaataaatgtatatatacgaggcgtaggttttttttaagtttatttttttgtaagttaattcgttttaagaattagttttttttaatttttgagtgtgtgggttgagtgtgggtaatgttgttattatttttattttaaatgtcgtaggtgtggaagtattattagtatttggtttgtatttttatagagtttttagtttttttttatttttttaagattgtattttatttttataatagttttgttttattagggagggaattgaggtttcgggtgagaggttttgtttaaaattttaaaattaatttttagtaagttttggatacgtcgcgttttttagatttagttattttattaatgttatatataagattatttataaaaataatttttaaggagtagggttgttaatgagaaattgataattgttggttgtttttagatttggattttttattttaattttttcgtatttacgttgggttagtaattattatgggagagttaaatgtttttttttttttttttttttttagtttttttggcgttttttttgtgtatagttaattaggttttttgagaagatagattttttaaaagagttttttattgaagaagaaaataggaattaaaaaaaaaaaaaagtaaagagagagagaagatagtagaaacgatagagagagagagagagagagagagagagagagagagagagagagagagaaaatgagagaagagggagaggcgaggttaagagttagagagtaagttaatataaaagattttattttttttttttttttttttttgggttggtattagaaagttttattttttcgtttatatataagagtataaatattagttttgcgcgtcggggtaagtttaggtagatttcgttattttatttcgattatttcgtatttgttttttagggattgttcgtttttgggcgatttatttcgaagtttttcgtaaggcgcgacggaggttttgtggtatgatcgtggcggtttttaatttagttatatttaaataaaatttttggtgtatttcggtagttaatattgtgtgtatgttttttttttttttttttttttttttttgttacgtcgttaatgtagtaggtaatgaggggaatgatatagtttttttattttcggaacgtagttaatttcggttttgcggattttatagaatatattttgtttattgtcggttttaataagaagtaattttttaggaagttgtcggtttcggtagtcgttaggatcgttgtttgcgttgcgttggtcgtcggggatttatttagggaggcggggtcgttggggaaggttcgcggggaatatagtatatttttttttaaatttttcgttcgcgtcgagtgtagggtttttagagtttatttagttttattttttatttataatagtttataaatggggaaggttagataagttagtagtagagttgggtttagaatttaggagttcgaatataattcgaggtttatatcgagattttaagttgttcgatttcgaagtttatttgtttttttttttttttttgttttttatttttttttattttcgtttttttaggggaatgtttgagcgagattttaaggttaaaagatggagtttttaggggttgagggtttttattataggcgttttaggtaaggttggagaaaaattaaatagaaagtttttttcgtttacgttggtaagaacgggaatttagttttatttggttttcgtttaaagtttttagaataggagttgttaagtcgtaaggattttcgaattcgattttttcgaaatcgtagagatatagtttggattcggtaaaggtcggggtttcgatttttgcgcgcgtattggtattttttaaagttgtttcgtttttttgtggttttttcgggaattataattttcgggtgttatgttttaattggtttcggtagtaggtttcggggtgcgttttcgggggttaggggatagcgaaagatttagttataaaggtcgtagtttggttttaaaattagttagtggcgttatattgcgtcgtttattttttttgcggtaagcggaagggttagagtcggtttgtaaagaacgagtttttggttttaaaattttatattgaggtttttttattttttcgttcggtgggataaaggtgaaagagacggttgggatttaataaggggtagggatgagaatttgggaagttaaaatgaagtaagtgtatttattggaaattaggagtttcgtggtttcgggagtttaaatcgaatggtgtttttatcgttgtttaacgttagagagagttttttattaaggtttgaaatcgttaatttttttttcgtttttttttttttttttattgatttagtttggttagagtttttcgatttggagaatgtttttcgtttttttttttttttttttagttagagaggttatagaggttgttggattattggtaatttaataattttaataattcgttgaaaaatttaaagggaaatttgaaagtgtaaagtattgtttagggataaggataaggaattttaataaggttgtaattgtcgtagtgaatttcgtattaggggttttgtcgtggggttttcggttttagtagtgttttagttaattagttgtacggttgtagatattatcgtggttcggcggtagggggtgaggttaaatcgcggagttgtttttatttttgggggaaaatatttttcgtttttttggttggggaacgggagggtgtaggagacgatagtaaataaaagcgaatttgataacgcgatggtttcgatagtcgttttggataatcgaggtgttcggggatattgtgttttgatttttatttttattacgttttttgttaatagtgtttttgtaagtttgtaagtttttaggaaatgtaataaaatagagggatgtgttttattattaagatttgaagaggagttgtagaagggacgttttttatacgtttagcgcgagatagttttttagaagggttcgaagataatgttagtaaatcgcgtttcggagtagagatttttcggtcgttttggttggattgggtttagtttttgtaaaaaggttggcgggggaggggagaagtatgatttttttaagtaaataatgtttttaaaaattcgatttggaaagaagttagttaaggtttttatttacgttaatgaagatggaaggtattaattgtttttggaaagcgatgagttaaatttgatcgcgttttaaattcgtttttagattcgtttttagttcgaatagaggcgcgttttttcgacgcggttttcgacggttttcgtagtgggaggggtcgaattcgattttcgtcgattcgggcgggggcgacggcgttgtttttttttgtagagcgcgtttgttgtcgttaggggtcgttagtatgcggacgcgcgtttgttattttaagttacgagttcggagaaagaaaattttacggaggaattgttgtggtataaattttggtttatttatatgatttttatttttttatatatatatattcggtttttcgttaggttattatgtagaggatgttaggaaggggaagagagcgattttagaatcgaggttcgttttgtaagtttttggtttaggttttaattttttttttaatacgtaaattttcgagtttcgagatttatattttttagtattatttgggtttttcgtgttattatcgaaaattttaggttatattttttttaaaaaaaattttttaagattgttggggagcggtttttaatgaatattggtaataaaggtgatttaagaggttaaatttatggttttggtagtcgttttttttttataaatatttttaaggagttgagataaattcgtttttggtttttagttattgatatgaaatttagaagtttaaaatttggttttggttaagttattaatttattattaataagttttttcgtcgggtttgtttttttaattgtaaaatagagttgtacgttttaaagtttttgagtttttaggtggtatttttttattatcgattttttttaagaggggttatagggataggaagatggtgtgttcgaagcgggttatttgtggttttttttagtgtaaatagatgtttatcgttgagtgatgggtaagtagcgaggtttttttgatttttattttttttgttaaaattttggaggttgtatgttatttttattggagggtgttttttttttgttagttttagtatttggttagggtatcgtcgttcgggaggtggaacggcgagtttatcgtttatggtcgcgaattcgattttagtttatcgttaggtggtaggttagttcgttcgagaatcgtcgcgcggtcgtagtttttatatcgatttttattcgtttttttttattttttgtttggtgggggcgagggttgggggtgtgattgtttttaaaagtaaagttagaaaatatttaatttagtgtatgtaatttcgtttttttcgatgttttcgtttttagtaattataacgcggtatttggagttggttttatgtattataagttgattttttttttagttttcgaaaagttttatgtattgggaagggaaagaaggtgtatttgtttttaaaaggtagaatggtattcgatagtattggtagagatttttgttaaatattggttatttagtaaagaaagtcgggaataaatttttgattttttcggaggaaaggggcgttgggggtcgagtgttggattttatttaggtttattgcgtttggtaaagcgggggagtggggagtcgggtatggttttttggtgaagttgtgggtttcggagtggatatcgggagggttgggaggggtcgtttttggtttttattggggtaaagagaaattagttagttttgttattacgttgtattttcgttgtgttcgcggcggtagcggcggttttatttgttgcgtagtgttggaaatcggtacgcgttattcgatgttgatttatagagggttatagattagtttattattgttttacgttatttataaatttttttaatatattttttatatatacgttttgttatcgtcggtaaaattatagtatttttagttattatggtgttttatattaaaatattttttattatttcggtattagataggtagtagaattaagatgttttgagaagttaatttaaggggaaggtcgggttattttcgtttggagaatttttttatttaaaattaattaggtattttttttttattaaaaaaaaaaattttagaattacgttgtttattataatattattttagttggaaagtaatattttttttttttatttgataaattttaaagttttttttattcgttagttttattttttttattttttttaaatttttgggggaaaaatgttttataagtttattttttaatattttttaaaaattgatttttgttaatagttttatttatcgaggggtggcgttgttgtatcgttttttttatattttttaagttttttataataaagtgggttgtgagtgttattattttgtaggggatagagggaaggaagggttttgatatttagtcgtggttattatttatttaattaataattggaattttttaagggtttagtaaacgataatttaagtatttagagttttatttttatttattaaatttagaataagttagtttttttaagaaagtattggtataaaattttttaaaattgaaaagaagaaaggggtaattggagaatttttattttttttggttgttttttttaagtcgtttagtttttatgaatagtatttagttttattgttattattaataatttttaaaattagttaatgtttcggtttttagtattggaaagttttttaaataggatattggaaatttttatttataagtttggggtggcgggcggggcggggaggtggagagagagttgttatttataggtttttattttggtttgaagatttaattgtagttattagagtaagggaatgtttattttttggtatttgttcgttattttttttttttttagagataaatattttttcgttttttttaaaaaagtatatattttaaagtaagaatgtgattttattttttttttttgagtttatgtttgttatttttaggaatagcgtgtggattagggttagatgaattttaatttgggttgtagatttacgaggttttgttttagtgttaaaggtttttggtagtaaatagtgagtaaaatagatatttgttttttgatggattttgtcgttttttttttttttttttaagttatttattaaaattatatatattttgtaaagaaaaagggaaattggtagtttttgtagaggaagtcggtggtatcgtttagagttataaattgtatttttaaatagttttttttttggtttttttttttttgttttattttttttaaaatttagattgtaaaaaatatatttattgatatttattttattttaaaaaaagaagagaaaaagtaaagcgttataagattttttttttggaaattataaattgaaaaaaaaatttataaaagattaaattttggcgggttgtggggtggcgggggtcggcggggagggggcgcggagtggagattggttttttgaggtggttaggggttttgtgatagtttgggatttttagtatttggtttggggttatttatttgtttaattgttaggatttttttatttttaaattttagttattaatataattatcgtagaagggaatataatatagagggtttttttttatttttttaaaaaatcggtttggttgtgtttttgttttttatgggggagttttaaaatttattattgtaatattagttttatttttcgttagggttttaataatacggtattataaaggtaacgtaatttatagtttttaagatatttattacggttattatattcggtagcggggtggtttttagtttttgttgttttttcgtttttttttttcgttcgttttcggagtttagtcgatttttgaggttttaattttatttatttttttttcgggtcgtcgtcgtcgcgtttttttttatttttattttttcgaggagagttataggttgtaaatttaattaatttcgtaatttatttttgtaaaattatttataaagatttttttttcgcgttcgcgttcgtttttttcgcgtcgggtttttttagttacggttataaagtgtttttttttttttttgagttttgtatataaggaacgcgggttggggttttgttcgttttttttttcgtttaaggtaaggatttcgggaatttgaagtttggcgtttattacgtttaggttcgtagttttttttttatagagtttgtattatgggaaaaaataaaataaaatttaggaaagggaggtaatagttattgggagttaatatagagttacgtagcgtttaaaatataaatatcgtagcggttagaaatttcgttatttttttcgtttttttaggttgttttgtcgaggttttttgagttttttcgtatattgaaaggtatcgtaggtgtagtgcgtattttttttttatttattttaagaagttttgtttcgttattagttttttttttcgggatgagtagggagagcgcgcggaggttttcgattttttcgattataattaagaaagaataatttttaaagtgtttaatattttcgtttttaagttttttaaaatataggggtagggaatattaaaatattcggtttttattaggaagattacggttttgaaaggaaatagtagatacgatattttattttatttggatttatgattaaaaaaataaaaataaaaatttaaagagttcgtttgtattttttttttttaaatttcggttcggttcgaaggtagggaatttaaaagatcgaggtcgatggaagagagttagcggggcgagcgagcgggtagtttttttttttgtttttcggagttatttagaaggataggggaagggaaggaagaagaggcgaggaaaaagaggagggagggaagcggaggttaggagcgacggagtaaggaaagtagtttgtaagcgagaaaagagggaaaaaatatagtcgtacgaatttagagagattataagtcgtacgtaagtagtagtagaaagagcgagagcgcgagcgcgcgtttttttcgcggtttggggttagatagtttttagattagttcgaattattttttaagtattgtttcgttttttttgtttcggtcgttttttaatttttttttttttttttttttattttttttttaaaaattaaaataatataagggagggtggtaaaagtttttttaaatcggtcgatttatttaaagataataataataataataaatatataataatttatattttatggtgggagagacgtgggattaattttcggtatttattttaatatttgatagttagaataaataaatatatatatttatattaatagatatatatagaaaatttggagttaaagtatttggtaagagcggaaaaaaaaagaattaaaaggtaaaataatgattatgagtagcggcggcggtagcggtattagcggtaatagcggcggcggcggtagtagtagtagtagcggcggtagtaatagtaataattatttggtgttcggttttttttagaaattttttgtattattatttttaagaattttagttttaagaattaatagagtttaattttcggaatttgagtttcggattttattattgttacgtggtaggggaggatttggtgttagtttttcgagatttttattgtttttggttaattaaaagtttttaaagttataagatttttttattggtcggtatatttcgaggtttttataagtagagcgtttcggatttggaggtttcggttcgaggttcgaggggtttgaaggtggtttttttttttcgggtttaagacgatggtatggtttgtttcgttattattacgtgggttttttttttgtgacgtcggcgttttcgttgtagtaaagttcggtttttggaattttgagaattaatttgttattcggtgatataagagggggagtgcgttttgttttttcggggtttggggttaatttttttttttttatttataaatttagtagatcgagttaaatgtataaaagggagcgagaggtttgaattattgggaaaagtatgttatatatatagtagggttagagaggcgagtaagagaaaaataaaataaaataaatattatagttttttttaattagaatattaggtattacgagaaaaatatttgttaagtagttttcggtgggtttatttgttttatttttatttaggataggggtttttgttgttgttttgggtttttttttttttggtgtggtggtttgggatttttggtttttgtattttgatggtttatggatttttgtttttgattttttgttttttgtaagtttgtggtgttacgtaaattataggatcggtatcggttggatttttttgtacgtgttttttttttttttatttaattttttaagcgttttaaagatgtattattttaatattaatattattgaaagaagtttaaatttttggttatatgtaataattttagtttttatttttttttttttttttttttttggtgtaatttttttttttttttttggatttttgttgaagtgtgttttttttgtattttagagaaatgtttaaaggatttgttttggtttggtttgtttttttttaggatagtaagtggtgggtttaatttgttattgttgatttttgggaaattttttgttgtaagaaacgtgtgtgtgggggggagggtgggggtggcggggtggtatgtgtgtgttttttataaaattttgtgagttaaatatttgtttgtgttttgtttttttttaaggttttgagatttttgttttcgaggttcgttttaaggtcgttgtaaaaaaatttttttagtttgtgtttaagagattagtcggagggaattttaaaggtttgtcgtgttagtattatagatattgtttgtatttagaatagattgttataattataatgtattatacgtagtatagtttttttagttttgaagttgagttggggggtggggtggggggggggtagagaagaaggagaaattttttttttttttttttttttattattttttttttaaaggtaattgtagtgtagaattattttattgtgggttttagtttgtttgtttagagttgttagtttttttatttaaatgttggttcgggttttttttttttttatttatttttgaataagggagatttttgttttttttatgttttttttttaaaagaagggtgtgaggggaaaataatattttagattttttaagaattagtttaaaatgtttggattagaagtagtttttaaaggttaggttgttttgagttttggttatgagagttttttaagcgatttattaaattatagatgaatttttaaagtttttataaaatttcgttatttgttaatttttaataaagatatgtttaaaataatttatttattttaatttaaaatttgggtttataatggaggagtgattagagttgtgaaagattgttgtttgttgggatatttggaaaattttttttattgatagtttcgtaagaagttttatttattatcgaaaatgttgttggtaatgtatttttttattttataatatatatatatttttaaaggttgtattttaggttttaaaatttagaaaggtgtaaagaggttgattattttttataagggttggagtttaggaaatatgcgttaaagtgtttgtttttgtgaaatttgaatattttaatatttattgatagatggattattgtagtttttgtagaaaagtttgttttgtgaacggtttttgaaaaatatatataggtttaattttgttattgttgttgaaatgtacgttttatttttaaagatatatgatattgttaagtttagatttattttgttagaaggtagattatttgtttttttatttgagttttttttttttttatttttaaagaaattaaaatgaatttcgttggatgtaaaatgatatttcgattttgtggaagggattttttttgtgtgtttatatgtgtaatttttttttttatgagtaattagtattttaggattttttagacgtatttatatggtttggaatgtgaattgtatggttttgttttattattgggtttttaaaagattatttttatgatttttggttatttttttttttgttaaaattgttatttagttttatttatcgttttttttaatttgaaatatagtttgttttttttgtgttttttttgttattttatttttagttttatgggggcgttgtagagtaaagggaaatttgttttttaaggtagtagtagaattagttagagtgggggttgggaaggaatttattttttttatattttagttttttttaattttttgtagtgagtttttagagggagaatttattagggttggtttatatataattaattttattattagggattttaaatttttttagtatattatttttgggattaagtgttagagtgttatatttttttattgttttttgttaaattaatgtgtttatattgaaagaaattgattagaatagaagattagttagaaagaaagagaaaattattattgaaaattttttaaagataggtatttatttttcggtgagttttttttattttgaattgaatgaatggtgaggaaaattgtgtattcgttttttaatttttttttaatttttaggaaagtaattttgttaaatattatattagttgaattttttttagaatgttatttttttttttatttttgatttttttttagtatttagttggtattattatgtgggttttttttattttcgtagtgtcgtgttataggattaaagaaagggttgatttgaacgtattttgatttttttaaattatttttaagaagttttaaagagtgattttatgtttggggtcgtatgaataatttttgtagatttcggggtattatattttaattagttttatgatttaatggttattggttgttaatatttagtagaggattaggttaatttttttgttttatggattgggtataagaataggtttttgattattgttgttgggtaaatataagttttattataaaataaaatagtttggttttaatattatatttatttgaggaaaagaatagattttatatttaatttttttttgtaaaattttttttataatttagttatagttgaaaaagaatttatttttggaataaatacggttttgttttttttttaagggggtttataagaggaagttggttttatttgttaggaatttttggtattttggtaggtttttaagatattatattataggattaaagattttaaaattgggaagatttttttaaattaattattttttttaggttttttttttttaggattataggttggtttttattaggagtatgtgtgattttaggaatataattgaaaatgggtttgtatgatttgttggttttttgttattttagaggattagtgtaatttgataatttgagtttgtaggtgtatattttgtgtttttgtagaattgagggaagtaaggttgttatggtttttttgtaaattgtaaaatttagagcgaattttaagttatgatgagttttgatggttatttgggtttatttatgttttttagttatattgaagtatttggtattgtttttgatagatttgggagatattatttattagatttgttaaattttatttgttcgttttattttaaattttttatttagaattgttgtaaataagttttttgtagtatttttggagaaagaaaggcgtttttaatatagtaagatgagtagaaagttttgagatattaaaaaagtgtataatttttagttattgttttttgaaaaggaagtattagtgtttaatttttatttatatgttgtttgtttttagtttttattgttttgagattttttttttttttagaaatttttttagtttggtttagagtttattttaaatattaattttttatattttttttatttatttaaaatgggaataaatattagaagtttaaaatagagaagtgatgggggttagggggtgtgtaatgatttgtttattgcgttcgatcgttgttttgaatagtagagtttttattttttatgaaattttagtatgaaggaaagtagtagttggattttgagagggatgagggaaggaaagtatttgagtgtttgtaaatttagggtggttggtttattcgttgtcgttgtcgggttgttggttgttgtatttagttgtttttattatttaaggttagaagtggaaaaatttgatttgcgtgttgtgtttgtatttttttttttttttttttatcgtttttttgtatatttgattatgtagaagtttatttgaagttagttcgatggtagggagagttggagagcggaagaatgtgcggagggagggagggttcggtatttttttatttatatttttatagtggttttttttgtttattttaatttttatcggtagaaattttttagttgtttgaaatttaagttattatattgttatttgaggttagaagatagatattttggtgtacgttttttatatgttagtgtttgtgtaatttatgtacgtatagagatatagatatataaatgtgattttacgggggtatagtgtagggagaaaaaaaaaaatattgtatttgttgtaaatatatatatatatatatatatatatacgcgcgtatatatatataaatttttggtttttaattatagttgt

SEQ ID NO: 11 - DNA, 6391 bp, Artificial Sequence
  chemically treated genomic DNA (Homo sapiens)
ggtacggtggcgggcgtttgtaattttagttatttgggaagttgaggtaggagaatcgtttgaattcgggagatagaggttgtggtgagtcgagatcgtattattgtattttagtttgggtaataagagcgtaattaatgggggtaaagataattattttagcgttgagaagagattttgaatttaagatatattttatatttgggatttagagtattttttgttttatttgttaatgttttagttagttattatgtttttttaaaatattattttttttgttgttttttttttgagtttgatgttaaattattaaaaagaagtgaatataaaggtatggagaaagtgagattagatttatgtaagtgttgtttagtgaattggatataatgtttgattatataggtacgagagggatttagagatagggatttatttatgttttgttgttgtagggtgttttcgtattttatttttattttttttgttatgaatttgtgtggagtgtttttttttttgtttttaattaaatatatagagattgagaaaattgattttagtgtttgagtgtatgcgtttgaattgtaatatagtttttttttttttttttttttttttttttttttgagatagtggttcgtttttttttttaggttggagtgtagtggcgcgatttcggtttattgtaagttttgtttttcgggtttaagttatttttttgttttagttttcggagtagttggggattataggcgttcgttattatatttagttaatttttttttttttttttttttttgtggtattttttgtattttagagacggggtttcgttgagttagttaggatggtttcgattttttgatttcgtgattcgttcgtttcgattttttaaagtgttggaattataggcgtgagttatcgcgttcggtcgtaatatagttatatttatttgtttttttaattagtggatatattttgtgattgattgattgtatgtaataatatgtgtatttggatatgtgtttttgggaatatatgaaatgatacgtttttaaataaatattggtagatagtaatcggtagaaatttgggtacgttttttttaagaaagaacgaagtttcgttttcgttttaatttggagtgtttattttttagcgttttttataggggtttggtttttattttcggaaggaggtggaggcgatttttattttttcgtcgtgcgtttgtgggaatattatttagaatggtttgcgttgggcgacggcgatttttagttaatgaggttttcgaaaggtggtgttttcgtaagcgtacgcgcggtcgcggcgggattttcgttgttttttttgtggcggtcgttttggtatttgtttggattgattatttggtagaaagtttcggagcgttgggttagtattattcgtgattgattgagaaggcgcgagaggagtttttttcgttgtatagaggcgtggttgaggttcggcggcgtttagggtatttaggttcggttcggaataaggatattttttttggtttcgtttcgtttatagagttagatggcggcggtcgagttgacggtttcggtttaggtatgtgtcgcgttttttgggtttttttcgttttttttacgttagttttagtattttcgagggcgtttgttcgcggttttgttgtttaggataggatacgggggttcgtcggaggggttttcgtttttaatatttggtgtgttagggaagggagggcgcgattggtaaggagtttttgatgagaggcgttattgagttttggggtatagaggtgatatagttattgcgagggtattcggttttaaggttaggtatggggttacggggtggtttgagtttatttaatatcgttatagatgtttttttttgaggtttggttttttttacgttttttttggttgtaaagggttatgaaatttacgttaggaaggggagggttttttagttttttattagttttaatttttatttataggttttttgggttgtggagtgttatttttttagtttttagttttgaagattttgggtgaattttaagtttagggttttatgtttatgttagtcggtatatagagttgttttaatttttggtagttatgtgaacgggtgtggaaagtttttttagaaaggtataagatgtgtaaatgtttaggtgtagtacggagttgggtgtatttatgaagttataagtttttttgttttttggtgggaagtaaagaataggaggataggcgttaggattgtagtggttgtttgagaagttgagtgtgtttttaggaggtaatagtaagtttgaattagaaaaaagaggtaatttattaaggtttttataggttttatttgtgtgtatagtggggtataaattggggggttgagggaggaggaaggaaaattagggtagattagtttaagtgagggttattggtttaggatcgtgatttaggagatgtggttagatttcggatgtgtggttttaaaagggataattaaattatataatgtaggtggtgagggagtgaaatagagggtttagagaagattttagggtttttggtattagtagttgtagggaaagaagttttattaattaagatgaataaattggtaataggagtaatatttattagggatattaggtttgtttatgttatgttaagagttagattttttagagtttattaaatggaggcgttaagtgggtagatgaacgtgtcggttttgaaatttagggagtggtttagggtgtagatatttaagatgtggttgttgtgcgtattaaggttagtgagttgtgggttatagttaggcggggtaagttttaggttttggttgtaaagttgttagtgggttaagattgggaggatgatgatagagtaagtggttatgaaggtaaggtatgtaaaagatagtgtagtttggtagtggttacggtttttaagagaagaatggatatgagatggatgtaaacgtataggatatttaggttaaaattcgtgtttatttattattttatgggtatttaggattttgtgataatttgatggggtttgggtgttttatttaggttggaagattaagttagtgttatgtggttatttgtgagagttattgtgtgtgagatgaacgattagtgaggttgggatttaaatgagttttaggtggatatatgatttttaaggggatggtaagtgtagtatagaagtggaatagggttatggttatttgtgatttatttgtggttttgtgtggttatgtttgaggtaaggaatatagtttggtagggaggtttttaaagaaatttttgaggttgtttttattagtgtaagttgtgggaagtttgggattttggattttgtttatatttatattttggatgttgtttgttaagttgcggtataaggtcggaaattaaggtttagtatgatatgtcgttttgatatttgatgaaaacgatatagttttagatggtttgagaataaatttttttttttattttgtttttatgaataagtttttttagttaaatgaatttttttatttattttatttagggaattagaatagtttttgtttattattttgtagtgggttttagttttttattaattttttgagttatttaaataagttagtttttttttttggggattagtggagtttttttattttgatgttataaaatttatattttatagtatttggttgttatttttttttggagtattattttcgtatggttttgtgtggagtgtggtatttttttataggttatgagtatttgtttttaattaataagttgtttagttaggcgtggtggtttacgtttgtaattttagtattttgggaggtcgaggcgggtagtttataaggttaggagattaagattattttggttaatacggtgaaattttttttttattaaaaatataaaaaattagttaggcgtgatggcgggtgtttgtagttttagttatttgggaggttaaggtaggagaatggtatgaatttaggaggtggagtttgttttattgtattttagtttgggcgatagagtaagatttcgttttaaaaaaaaaaaaaaaattaataaattgttgattttatttgtttaatgttacgtgttttatatttggttgttggttatttattttttttttttgttttttgagacgtagtttcgttgtgttattacgttggagtgtagtggcgtgatttcggtttattgtaatttttatttttttattttttgggttttagtgatttttttgttttagttttttgagtagttggtattatagtcgtgtgttattacgtttggttgattttttgtatttttagtagagatggggttttattttgttagttaggatggtttttattttttgatttcgtgattcgtttatttcggttttttaaagtgttgggattataggtatgagttattgtattcggtttaggttatttatttttttatttaggtagtatgtggggaagttaggatttgtttgtggtataggacgtagtggtggttatggttatgtggtagtgggatttggagatttgaggtatgtgtagtgtaatgaatgatatgtatttggagagggagtgtgtttgatggttttagtgttttgattgagatttatatgattttggttatatgagaggaatgtttgttaggaaggagtggttgtttttatgttacgtttatagtttagatatatgtatttgtttatttgttttttgttattgatggttgtaattagtgattaagagttttattaggagataatagtattagttgattgtttttttttttgagttggggagtttggagagtttggaaagaggatgagtatggggtaaatgtgtgaggggaaggattatggattttgagaggaggaatcgtttgtggttttatgtgtttttattttggtagggtattgtgatttttgaggacgtggttgtttattttttttggaaggagtggggtttttttgatgaggtttagaaatgtttgtattacgatgtgatgttggagaatttgatatttataatttttttgggtaaggtttttatatttatttttatgtttcgagttagtttttgtttttattttttttttagagttagatgtgtttttataagaggattattgatatagttttttgtttttgggtaggtgttgcggttggtagggttaaggttgtatgttgtttgtttttttttttgagtaagtaatatttgttttttttttatgtggaaagatttagagttaggttttttatagtcggttttatggattttatttcgtttgttttttttggttaggtgatattgtttagattcgaggttttttaaggtttaggttttattttttttttttaggggatatttttttatgtttgtttttgttagtaattattattattgatattgttattatttatgtggattacgagtggtttttgtaaaatttttttttgaatttttttttgtattattatttttttttttgtaggttattatgtgtagagttattttgggttggttttgggtgtttgtatattttaagtttcgtgtttttgattgtaggggttagatggataggttttgtggttttgaggatggttgtgattttttatagtaagatggatttagagggagtttggttttagggattaatatttaaaggaggatattttataagggttatgtttatattatattagaaatatattttgtttgattaatatttggtgttaatgatatttggggttaaattttattattgtttttttttttttatttttgatatttagtttgtttgttagttgtttatttggttattacgttttttatttttagtttggggttaatttttatatttttggattttatgttttatttattttttttattgttttatttgtagtgttttttagtgttggtttttatataatatgttatgaggtgtttacgtatgttagtcgttattttgttgttatatttttttgggtttggatatatatttgtatataatgtatgtgttagtaggatagtagattttattgaaaattgttttagaggaatgagttgtatattttgttttttttttatgttttttattttatggttgtgttttttaatttatgagttttttttagttttgtgatttttagaggtttagttttgttaggtagttttatttttaatttgaatttaatattttggttttgaaaataattttatggatttagtttttgggtttgttggatgtatatttgtttgtgggttatttttattttattaaagttagtatgttttttattagtatttttttttttttagg

SEQ ID NO: 12 - DNA, 6391 bp, Artificial Sequence
  chemically treated genomic DNA (Homo sapiens)
tttgaaagaaagaaaatgttggtgaagagtatgttgattttagtggagtggaggtagtttatagataaatgtgtatttaataaatttaggaattgagtttatggggttgtttttaggattaaggtgttgggtttaagttgaagatagggttgtttagtagaattgggtttttaaagattatagaattgggaagggtttatgagttaaaaaatatagttatgggatgagaaatatggagaagaggtaggatatataatttatttttttagaataatttttagtgagatttgttgttttgttaatatatgtattgtgtataggtatgtgtttaggtttaagaaaatgtgataataaaatagcggttgatatacgtggatattttataatatattatgtagaggttaatattgaagagtattgtagataaggtagtgagaaaaatgggtgaaatatggagtttagagatgtggggattaattttaggttggaagtaagagacgtagtaattaggtggatagttgataagtaagttaagtattaagaatgggaaagaaaaggtagtaatgaggtttggttttaaatgttattagtattaaatattagttaaataggatatgtttttggtatgatgtgaatataatttttatagaatgtttttttttaggtgttagtttttagggttaggttttttttgagtttattttgttgtggggaattatagttatttttagaattatagggtttgtttatttgatttttataattaagaatacggaatttggaatatgtaagtatttaagattagtttagaatgattttgtatatgatagtttataggaaaaaaaataataatataaggagaaatttagaggaggattttgtaagagttattcgtagtttatataagtggtgataatgttagtgatgataattgttggtagaggtaggtatgaggaagtgttttttagaggaaggaagtagaatttgggttttgaggagtttcgaatttggataatgttatttggttaggagaggtaaacgaggtgagatttatgaggtcgattataagaagtttaattttgaatttttttatatgaaagggaagtaggtgttgtttgtttaaggagaaaagtaggtaatatataattttagttttattaatcgtagtatttgtttaggaataggaagttgtgttaatagtttttttgtgaagatatatttgattttggggaaagggtaagagtaaaggttagttcggggtatagaggtgggtgtgaggattttatttagggaggttgtaagtgttaagttttttagtattatatcgtggtataggtatttttgagttttattaagaagattttattttttttaggagaagtaaatagttacgtttttaaaggttataatgttttgttaggatggggatatatgaaattataaacggtttttttttttaggatttataatttttttttttatatatttattttatgtttattttttttttaagttttttaagttttttagtttagaggagaaagtagttagttggtgttgttgttttttaatggggtttttggttattggttgtagttattagtaataagaggtaggtgaataaatatatgtatttaagttgtgggcgtggtataagggtaattatttttttttgataagtattttttttatatgattaaggttatgtaagttttaattaggatattggggttattaggtatattttttttttaagtgtatattatttattatattgtatatattttaggtttttagattttattgttatatgattatgattattattacgttttatattataggtaaattttggtttttttatatgttatttgagtgaaagagtagataatttgggtcgggtgtagtggtttatgtttgtaattttagtattttgggaggtcgaggtgggcggattacgaggttaagagatggagattattttggttaatagggtgaaattttatttttattaaaaatataaaagattagttaggcgtggtggtatacggttgtagtattagttatttaggaggttgaggtaggagaattattagaatttaggaggtggagaggtggaggttgtaatgagtcgagattacgttattgtattttagcgtggtgatatagcgagattgcgttttaaagaataaaaaaaaagagtggataattaatagttaaatataagatacgtgatattggataaatgagattaatagtttattaattttttttttttttttgagacgaaattttgttttgtcgtttaggttggagtgtagtggggtaagttttattttttgggtttatgttatttttttattttagttttttaagtagttgggattataggtattcgttattacgtttggttaattttttatatttttagtagagaaggggttttatcgtgttagttaggatggttttgattttttgattttgtgagttgttcgtttcggttttttaaagtgttgggattataggcgtgagttattacgtttggttgaatagtttattaattaaagataaatatttatagtttgtgaaagaatattatattttatatagggttatacggaggtagtattttagaaaagagtaataattaggtgttgtagaatgtaagttttgtagtattaagatggagaagttttattggtttttagaggaggggattggtttgtttgaataatttaaaaaattgatagggaattgaaatttattataaagtaataagtaggaattgttttggttttttggatagaatggatagaagggtttatttggttaagagagtttatttatgggagtaaagtgggaaggggaatttgtttttaggttatttaaggttgtatcgtttttattagatgttaaggcgatatattatattgggttttaattttcggttttatatcgtaatttggtaggtagtatttagagtgtggatataaataggatttaaaattttagattttttatagtttatattagtggaagtagttttaaaaatttttttgaaggtttttttgttaggttgtattttttgttttagatatagttatatagaattataggtgaattatagataattatggttttattttatttttgtgttgtatttattatttttttgagagttatatatttatttaaagtttatttaaattttagttttattggtcgtttattttatatataatgatttttataaatgattatatgatattaatttaattttttagtttgaatgaaatatttaggttttattaagttattataaaattttggatatttataaagtggtgaataagtacgagttttggtttgagtgttttatgcgtttgtatttattttatgtttattttttttttgggagtcgtggttattgttaaattatattgttttttatatattttgtttttatgattatttattttattattatttttttagttttggtttattaatagttttataattaaaatttggagtttgtttcgtttaattgtgatttatagtttattaattttggtgcgtataatagttatattttgaatatttgtattttgaattattttttagattttaagatcggtacgtttatttgtttatttaacgtttttatttagtaggttttgaaagatttgatttttagtatggtataaataaatttgatatttttagtgaatattatttttattgttaatttgtttattttagttgatgaaatttttttttttatagttgttaatattaaaaattttggagttttttttgaattttttgttttatttttttattatttatattatgtaatttagttgttttttttgaaattatatattcggaatttaattatattttttaaattacgattttgggttagtaatttttatttggattagtttattttgatttttttttttttttttttaattttttagtttgtgttttattgtgtatatagatgaagtttgtgaagattttggtaaattattttttttttttgatttaaatttgttattattttttgaaaatatatttaattttttaggtagttattgtagttttgacgtttatttttttgttttttgttttttattagaaagtaaggagatttgtggttttataaatgtatttagtttcgtattgtatttaagtatttgtatattttgtatttttttggaaaaattttttatattcgtttatatggttgttagaaattggaataattttatatatcggttaatatggatataggattttgggtttggggtttatttaaggtttttagaattaagggttgggggaatggtattttataatttagagaatttgtgggtgggagttagggttagtgagagattgggaaatttttttttttttggcgtagattttataattttttatagttaagggaaacgtagaaagagttaggttttagagaagagtatttatggcggtattagatgggtttaagttatttcgtagttttatgtttggttttggagtcgggtgttttcgtaatggttgtgttatttttgtgttttagggtttagtggcgttttttattaggggttttttgttagtcgcgtttttttttttttagtatattaggtgttggaaacgggagttttttcggcgagttttcgtgttttgttttgggtagtagggtcgcgagtaagcgttttcgggggtgttaggattagcgtggggagggcggggaaggtttagaggacgcggtatatatttgggtcggggtcgttagttcggtcgtcgttatttgattttgtgagcggagcggggttagagaggatgtttttatttcgggtcgggtttgggtattttgggcgtcgtcgagttttagttacgtttttgtgtagcggggaagatttttttcgcgtttttttagttagttacggatgatgttgatttagcgtttcggggttttttattaagtaattagtttagataaatgttaaaacgatcgttataaggaggataacggaagtttcgtcgcgatcgcgcgtgcgtttacggaaatattatttttcggaggttttattggttgaaggtcgtcgtcgtttaacgtaggttattttgggtaatgtttttataggcgtacggcgggagagtgagggtcgtttttattttttttcggaagtaaaggttaaatttttgtagggggcgttgggaaatggatattttaggttggggcggaggcgaggtttcgtttttttttaaaggagacgtatttaggtttttatcgattgttgtttgttagtgtttgtttggagacgtgttattttatgtgtttttagaggtatatatttagatgtatatattattatatatagttagttagttataaaatatatttattggttgagaaagtaaataaatatgattatgttgcggtcgggcgcggtggtttacgtttgtaattttagtattttgggaggtcgaggcgggcggattacgaggttaggagatcgagattattttggttaatttagcgaaatttcgtttttaaaatataaaaaatattataaaaaaaaaaaaaaaaagaaaaattagttgggtgtggtggcgggcgtttgtagtttttagttatttcggaggttgaggtaggaaaatagtttgaattcgggaggtagagtttgtagtgagtcgagatcgcgttattgtattttagtttgggggaaagagcgagttattgttttaaaaaaaaaaaaaaaaaaaaaaaaaaaaaaagattatgttgtaatttaaacgtatgtatttaagtattggagttagtttttttagtttttgtatgtttgattagggataagaaaaaaaatattttatataggtttatgataaagaggatgaaggtgggatgcggaggtattttgtagtagtaggatataagtagatttttgtttttgggtttttttcgtgtttgtgtagttaaatattgtgtttaatttattaagtaatatttgtatgaatttaattttattttttttatgtttttatatttatttttttttaataatttgatattaagtttagaaagagaataataaaaggaatggtattttgaaaaggtatgatggttagttagagtattaataggtggaataaagggtgttttgaattttaaatgtagggtgtattttaaatttaagatttttttttaacgttgaaatgattatttttgtttttattagttacgtttttgttgtttaggttggagtgtaatggtgcgatttcggtttattataatttttgtttttcgggtttaagcgatttttttgttttagttttttaagtagttggaattataggcgttcgttatcgtatt

SEQ ID NO: 13 - DNA, 7544 bp, Artificial Sequence
  chemically treated genomic DNA (Homo sapiens)
cggttttgattttttgattttgtgattcgtttgtttcggttttttaaagtgttgggattataggtgtgagttattacgtttggtttttttttttattttttttttttatttgatttttttttttttgttttttttatgatttttttttttttttttttttttttttgttttttttatttttttatttttttttttatagtggagtataaattttttaaatattttttttattattttatttttttttattgtttttttatttttttagtatataaattattataaagttaaaatttttgatgaattataaaaaaagttgtagaatattattatagaataatataatttgatttgtttttaaatgtttatattagttttatttatattttatatagtatattatttttttaaagatttgatttattttaggtgaagtaatgaaattttttttttcgtttagtatgttacggtatatataataattttgagtaaaaagagaaaatagagaaataaaattaatttttaaataagttttttaaaaatatttttttaaaattttaaataatgtaaaagtgaaataattatttagtaagaaagtttttttttttaaataagtaaggggagttaggtgtggtggtttatgtttgtaattttagtattttgggaggtcgagacgggtggattacgaagttaggagattgagattattttgtttaatatggtgaaattttatttttattaaaaataatataaaaaaattagtcgggtatggtggagggtgttcgtagttttagttatttgggaggttgaggtaggaaaatggcgtgaatttcggaggtagagtttgtagtaagtcgagatcgcgttattgtattttagtttaggtgataaagtgagattttattttaaaaaataaataaataaataaataaataaataagtaagggaaatatggtgtttttatttaaattttataaagtaatagttattttataaaatcggtagaaaaataattatattttgatcgtaaaggtagaagttatgtaacgtttatttttgtacgttagattttttttttttttttagtttttatatttaatatagtaagattttgtttatttttttagttttttttttaaattttaatattttttgttttatatatgggttttgtttgttggtgatgttttgttttttgatttgggtgttggttatatgggagtatttgttttgtgaaaatttattgagttgtaaatttgtggtttatgaatttttttatatgaatattatatttttagaaaaagggttgttttttttttttttattagttttgtttgtttagatatttatgttattgtaaatttttatttttttttttttttaattttttttggtagttttatatttaattttcgaatttgtttaaatgttatttagttgattttttttagttttttaatttaaggttaaatttagtgttattttttttgagttaatttgtttttgttttttattataaagtatagttgtttgtagaagattatgttttatttatttttatattttaagttttagtacgatgtttaatttttaagaaatatttaagaattgagttaaatattttttatgttttttaagtttttattttattattttattataggtgatatgggttttagttttattttagaattaaagaatgttataaaatacgaattttttagttttttatttttatttggtttttaatttaatttggggattttaagaatgaaatgttttttttttttttttttatttaaatttaattttttcgtttgtgttttggattattttttatataatttttttgagtttttttagttgttttttttttttttttagttttaattttttttttttagtatttaaaataaattaagttatttttatttttgagaatatttttttaatttatatatttttttttttaggttttttagtttcgtttataaggaaatattattggggtatttacgtttttttgtgttatgaattattgtggtagtttagtgatgtttatagatttttttatagagtgtttttaaatgtatagaattataaagaaataattgaaaaatgtgtattaaatgttttaaaaaatgtgatatatatatttttttattagtgtattaaaaaaatataattaggtcgcgtatagtggtttatatttgtaattttaatattttaggaggttgagataggcggattatatgaggttaggagtttaagattagtttggttaataaggtaaaattcgatttttattgaaaatataaaaaatttagttgggtatggaaatatatatttgtaattttaattattcgggaggttgaggtataagaattttttgaattttgaaggtggaggttgtagtgagttaagattgtattattgtattttagtttgggtgatagaatgagattttattttaaaaagttaataaataaaaaagtttataattaagttaaagatttaataattaataaaattttgaagtaaggatgagtacgatgaaattttgagatgtttgtgattattgtattgtgataaggaaatattaatgatttttatagatgataaagttataggtattgttgatgttattagttgttgcgtatgtttataattgaagaaatgttaaattttagttgaaagttagtgaaaataaaggtataatattttttttatttagttttatgaaatttttgatttttattaaagggtttttaggttaagagtttttatattttagagttatttttatttttaatgttgggaaattttttttttttttagtatgttttttttggttttttggttttaaatatgatttatatgttgatgacgagtaaatgtatatatgtttgtttagttttttttttgaatattaggtttattttttttttttttttttttgagatagagtttcgttttgttgtttaggttggagtgtaatggcgaaatttaggtttattgtaatttttgcgtttcgggtttaagcgatttttttgttttttgattagttgggattataggtataagttattacgttcggttaatttttgtatttttaatagagacggggttttattaagttggttaggttggttttaaatttttgatttcgtgatttattcgttttggttttttaaagtgttgggattataggcgtgagtcgttacgttcggttttgaacgttagatttttatagcgaattgtttattttttatttttatttgtatgttattgttaataaaatatgtataaaatgtagtttttggtgtaggttttttttttagtatttttttaaatttggttttgtttgttttaattttaataaaaggtattattattatttaattgtttaagttaaaagtacgaattagttttgattttttcgttttattatttaatttatcggtaaattttgttagtttttttttaaattatttttttttatttttagtattattatattagtttaagttatttattttgtagttttgtttaatcggtatcgaaagaaagatatcggttttgggtaaatttcgatattagagttatattattatatttaataataatggttaatttaattttagaattttatagaggttatattttaatttagtaaaagatgaaatattttaaaataaaggattataggtttttattaaatggttttgtagaatagataaggaaacgtgggttagaaagttgtgattgtgtttaattttagaatagtgaagacgatttagattgtatttttaattgtatatgtgagaaaatttagtatatgtttttaatgttagttgaagttattttaatatagacgattttttaggtagtaatttttatttttagttgtttgttggagatttttatttaagagttttatatattttaaatttatatattagtttgaattttttattttttttttcgtatttttttttttaaagtaatgaatttatattatttattattagttaagtaggaaagttatttttttcgtattataaatttaattagttatattttgttttttaaatatttttggatcgtgtttttttttttttattggtattgtttttgacgtgagttagttttgattaattgataaattatttgtttttaggtttttagaaatggttttttttttggtaggtatttttattgtttgggttgagaattttcgggttttttttttttggtttgtatttcgtaaatcggttagagagggtttagttttcgggttattcgatttatattttggttggattagttaatattttttttatgtattcggttatagtgatgggattagtagattttattttgtatataagatgtcgtagtatcggcgttatcgggttttttgtaggtttattttcggagttgaagtatttttttttttaaataaaaggaatggttgcgaaaaatataaattaaatagattttatgataaatttgattatttacgagcgtaagtcgtttgagcgtttttaaaatagtttcgtgaatttttaatttcgttttatcgtagatcgcgggttattgtgtttagtacgtttacggggcgtagagatagtatttatttgtttacgattacgtagttttattgcgtttgtatcggattcgtttttagtttagggtatttttaaggtggaagtgagttttcgagtttttgatttttcggtatttttaattgaagagttgaggaaggcgttttacgcggtttttacggtaatcgggtttcgaggggattgacgtttatttgcgcgcgttacggtatataacggttttaaatttgattttagtagtatatttatgttgaaattcgtaggttagttcgtttcgttaggagttggggtttagattattttcgggagaagatacgtttcgataggaattacgttattggtagagcggaaataggttgagttttacgcgcgtatgttttgttcgttatggtcgtagttaaggagtttttggagttttatgttaagcggttttggcgtttcgaggaggtagtagaagattcggacgaggaggatgaggataatattagtgaagtcgagaatgggttttttttggaggaagtgttacggttcggaggtattaaggtaacggtcgcgggtttcggggaacgggattaggcgtggagagtttcgaaggtggttaggttgattgtttcgtcgttttcgcgttgcgtagagcgcgggcgtttaggatcgagattttagtttttgaagtatgtgttcggtgcgttttttacgtcggtttttattgttgtttataaaagaaaagtttcgaattgaacgttgtattttttggttatttttaggatgtaggcgattttttgattttattgacgtggtataattattatattattaggtcggagagtggttttttttggttttgattttgtggtatgagtgttttgaatattagtggtattggaatttttatttttgtttttatagagtatatgtacgtgttattgtatgttttagaagtttttttttttggagtattttaattaagggagagaaatagtaaataaatttttaaatatatagtatagtagacgcggggtagtgttataaaagaaaataaaataaggaaggacgataaggagtgggagcgcgttagtattaaatgagatgatcgataaatatattacggaaatgtttgagtagaattttaaaggataggaaggagtgagttgttattttagttagttggaatagtaaatgtaaagataggtagaagagtgtttaatttattttatgagtagttaaaatgttagtgtagtagaggtagagtgagttaaggggagaatagtaagaaaggagggtcgaggggttagagggtaggtttttgttttgagtttgatgtaaaattattggaagattttaagtagataaggaatagaaattaattttgtttttaatattattttgtttggagattggatttttaaggtggaggagttagttagagataggtagatttatagtttgttttgtgtttgtgtatatttaagttttgaataggtaatatatatatatgaaatacgtggtgtaaattttaaaagatatatagtgaagttaaattgtttttatttttattttagttataattattgttttgataggaagtaattatttttataattgtattttatattttttagggatattatatatttttttaagtatatatatatttatttatgtgtatgaaatacgggtgtattttttttatataaatggtattatatatatatatttatttttatattttgtttttttttttgttttagaaatttttttatattagtgtataacgttttgtgttattgttatggttgtataaattattttgtttgttttaatttatttaattagttatttattgtgaatatttaaattattgttagttttttattattttaaataatattatagttaataattttaatcgtgttttttttttatttttgtaagtgtatatgtagtataaatttgtagaaatgagttaggtatagtggtttatatttataattttagtattttgggagttagaggtgggaggatattttgagtttaggagtttgagattagtttgggtaatataaggagattttattttaaaaaaaaattttttttttaaatagttgggcgtgtagtgttagttataggttgaggttggaggattattttagtttgggaggttgaggttgtagtttagttatggttatgttattgtatttaagtttggataatagagcgagattatgttttaattagttagttaatttttagaaatgaagttgttgggttaatagatgtgtgttttgtattaaatagttgtgattggagttgataaattgttttttatggaggttgtgttagtttatatttatattaattatgtatgaaagtgtcgttttcgttattttttttttagtattatttgttattgtattttgtttattttgtagtgtatttttgtttatttgataaattaaaagatggatgtattattgtggttttaatgtggatttgtttaaattttagtgaggttgaatatttttttatatttttaaagaattttttttttttatgaattgtttatgttttttgtatattttttttttgggttgttatttattgatgtgtagaaatttatattaagggattaaatttaattattttgataggaattgtttgtattttttttttagtttataatttatattttttttttatatcgaaataaaaagtgtgtgtgcgtgtgtgtgtgtgtaaaagaaagagagagaaagagaaatttatttatttttttttttgtggattttgagttttatgttaaatttgaaaggatttttttagtttcgaaattatttttaaaattatgttgtgttttttattattttatggttttattttttatatttgtaatgtatttttaatttatgtttttaatgtagt

SEQ ID NO: 14 - DNA, 7544 bp, Artificial Sequence
  chemically treated genomic DNA (Homo sapiens)
gttgtattaaaaatataagttaaaaatatattataaatgtgaaaaataaaattataaaataataggaaatataatataattttaaaaataatttcggaattggaaaaatttttttaaatttgatataaaatttagggtttataaaggaaaggataagtaaattttttttttttttttttttttttatatatatatatacgtatatatattttttatttcgatataggaaaaaaatataaattataaattggaaaaaaaatataagtaatttttattaaagtaattgggtttaattttttaatataagtttttatatattagtaagtgataatttaaaagaaaaatgtgtaaaggatatgaatagtttatagaaaaaaagggttttttaagaatatgaaaagatgtttaattttattgaggtttagataaatttatattaaaattataatgatatatttattttttaatttattagatgagtaaagatatattgtaagatgagtaagatataatgataggtgatgttggggaaggggtggcggaaacggtatttttatatatggttgatgtgagtgtaaattgatataatttttatggaggataatttgttaattttaattataattatttaatataaggtatatatttgttggtttagtagttttatttttaaaaattaattaattgattgagatatggtttcgttttgttgtttaggtttgagtatagtggtatgattatggttgaattgtagttttaattttttaggttgaagtgattttttaattttagtttgtagttggtattatacgtttagttatttaaaaaaaaaatttttttttgagatgaggtttttttatgttgtttaggttggttttaaatttttggatttaaggtatttttttatttttgatttttaaagtgttgggattatgggtgtgagttattgtgtttggtttatttttataaatttatattatatatatatttataaaagtgggggaaaaatacgattaaggttattaattgtagtattatttaaaatagtgaaagattggtaataatttaaatatttataataaatggttggttagataaattaagatagataaaatgatttatgtagttatagtaatgatatagaacgttatgtattgatatagaaggatttttaagatagaaaagaaagtaaaatgtagagataggtgtatatatatggtattatttatgtaaaaaagatatattcgtattttatatatataaatgagtatgtatatgtttgaaaaggtatatagtatttttgaaagatataaaatgtagttgtaaaaataattgttttttattagggtaatggttatggttgagataaaagtggaaataatttgattttattatgtattttttaaagtttgtattacgtgttttatgtgtatatattatttatttaaaatttaaatatatataagtatagagtaaattgtgaatttgtttatttttaattaatttttttattttgaaagtttagtttttaaataaaataatattaaaaataaagttaatttttgttttttatttgtttaaaattttttagtggttttgtattaaatttagagtaaaagtttgttttttgatttttcggttttttttttttattattttttttttaatttattttgtttttgttatattggtattttggttgtttatggaataggttaggtatttttttgtttgtttttgtatttgttgttttaattgattggaatggtagtttatttttttttgttttttaggattttgtttaaatattttcgtgatgtgtttgtcgattattttatttaatattaacgcgtttttattttttatcgtttttttttgttttatttttttttatagtattatttcgcgtttgttgtattatgtgtttaaaagtttgtttattgttttttttttttaattaggatgttttaaaaaagagggtttttggggtatatagtgatacgtgtatgtattttatgagaatagaaatgaaaattttaatattattggtgtttaaaatatttatattataaggttaggattaagaaaagttatttttcgatttgatggtgtgatggttatattacgttaataaaattagaagatcgtttatattttaagaatagttagagaatataacgtttaattcgaaattttttttttgtaaatagtagtggaaatcggcgtgggaagcgtatcgaatatatgttttagaggttgggatttcggttttggacgttcgcgttttacgtagcgcggaagcggcggggtagttagtttagttattttcggaattttttacgtttgatttcgtttttcggagttcgcggtcgttattttggtgttttcgagtcgtaatattttttttagggagaatttattttcggttttattagtattatttttatttttttcgttcggattttttattgttttttcggggcgttaaggtcgtttggtatggaattttaaaggttttttgattgcggttatggcgggtaaagtatacgcgcgtgaaatttagtttattttcgttttgttagtggcgtaatttttgtcggggcgtgttttttttcggaaatggtttaagttttagtttttggcggagcgagttagtttgcgaattttagtatgagtgtattgttgaggttaggtttggggtcgttgtgtgtcgtggcgcgcgtaggtaagcgttagttttttcgaagttcggttgtcgtggaagtcgcgtggggcgttttttttagttttttagttgagggtatcgggggattaagggttcgggggtttatttttattttgaaggtattttgggttggaaacgggttcggtataaacgtaatagggttgcgtagtcgtgggtaagtgggtgttgtttttgcgtttcgtgggcgtgttaagtatagtagttcgcggtttgcggtggggcgaggttaagggtttacgaagttgttttgaaaacgtttaggcggtttgcgttcgtgaatggttagatttattatggggtttgtttaatttgtgtttttcgtagttattttttttatttggagagggaaatattttagtttcgggaatgagtttgtagaaaattcggtgacgtcgatgttgcggtattttatgtataaaataaagtttattggttttattattgtggtcgagtatatgaaggaggtgttgattaatttagttaaggtatgggtcgggtagttcgaggattaggttttttttagtcgatttgcgaggtgtaagttaggagggagaagttcgaaggtttttagtttaggtagtgggggtgtttgttaggggaagagttatttttgaggatttggggatagataatttgttagttggttagggttggtttacgttagaggtagtgttagtaaagaggagaggatacggtttaagggtgtttaggagatagaatgtagttgattggatttatgatgcgggaaggatgatttttttatttggttgatggtgggtggtgtggatttattgttttgggagaaggaatacgggaggaaggatggagagtttaggttggtatatgaatttgaagtgtgtgggatttttaggtagaaatttttaataggtagttggaaataggaattattgtttggaaagtcgtttgtgttggaatggttttagttggtattggagatatgtgttgggtttttttatatgtgtagttgagaatgtagtttgggtcgtttttattgttttaggattaggtatagttatagttttttgatttacgtttttttgtttgttttatagagttatttggtgaaagtttatagttttttattttagaatattttattttttgttgggttgaaatatgatttttgtggaattttggggttagattggttattgttgttggatatggtagtgtgattttagtgtcgaggtttatttaaggtcggtatttttttttcgatgtcggttaggtagggttgtaagataggtggtttagattagtgtggtggtattagaaatagaagagggtgatttagaaagggattgataggatttgtcgatggattgagtgatggaacggaggaattaaggttgattcgtatttttagtttgagtagttgggtgatgatggtattttttattgagattaagatagataggattaggtttggaggagtattagggagagggtttatattaggagttgtattttatatatattttgttagtagtgatatgtaggtggagatagaaagtaggtaattcgttgtaagagtttggcgtttagggtcggacgtggcggtttacgtttgtaattttagtattttgggaggttaaggcgggtggattacgaggttaggagtttgagattagtttgattaatttggtgaaatttcgtttttattaaaaatataaaaattagtcgggcgtggtggtttgtgtttgtaattttagttagttaggaggtaggagaatcgtttgaattcgggacgtagaggttgtagtgagtttagatttcgttattgtattttagtttgggtaatagagcgagattttgttttaaaaaaaaaaaaaaaaaaagtgagtttggtgtttagaagaaagattgggtaggtatatatatatttgttcgttattagtatataggttatatttaaagttaaggaattagggagaatatattgagagaaaggaaggttttttagtattgagagtaggggtaattttaaaatgtagaggtttttaatttagggattttttaatagaaattaggggttttatgaagttggatggaaaaaatattatatttttatttttattaatttttaattgaaatttagtatttttttaattatgaatatacgtagtaattagtagtattagtaatatttgtgattttgttatttgtggaaattattggtatttttttattataatatagtgattataggtattttaggattttatcgtgtttatttttattttaaaattttgttaattattgggtttttggtttgattatgggtttttttgtttgttggttttttgagatagagttttattttgttatttaggttggagtgtagtagtgtaattttggtttattgtaatttttatttttaaggtttaaaggatttttgtgttttagtttttcgagtagttgggattataggtgtatgtttttatgtttagttaggttttttgtatttttaatggagatcgggttttgttttgttggttaggttggttttgaatttttggttttatatgattcgtttgttttagttttttaaagtgttgggattataggtgtgagttattgtgcgcggtttaattatatttttttaatatattagtaaagaagtgtatatattatattttttagaatatttgatatatattttttagttatttttttgtggttttgtgtatttaaaaatattttgtgaaggggtttataggtattattgggttattatagtggtttataatataaaaaagcgtaaatattttaataatgtttttttatgaacggaattagaaagtttagaagaagagatgtgtggattgaaaaaatgtttttaaaaatgggagtgatttgatttattttgaatgttgaagggggaaagttgaagttggaagagagaaggggatagttaaaaggatttaggggagttgtatgaggaatggtttagagtataggcggagggattaggtttggatgagaggagaaggggaaggtattttatttttggagtttttagattaggttagaggttaggtggggatgggaagttgaggaattcgtattttataatattttttaattttggagtgagattggggtttatgttatttgtagtaaggtggtagaataggagtttgagaagtataagaaatatttaatttaatttttgagtgttttttgaaggttaggtatcgtgttaaaatttgggatatgaagataaataaggtatgattttttgtaaataattatattttgtggtgaagaatagagataaattagtttagaaaaggtggtattggatttggttttaggttggagggttggaggaggttagttaggtggtatttgagtagattcggaggttgagtataagattgttagggaaagttgaaaagggagaagggtgaggatttgtagtggtatggatgtttggataagtaaggttaataagaaaaaaaaaaataattttttttttggagatataatatttatatagaaaagtttataaattataagtttatagtttaatgaatttttataaagtaaatgtttttatgtaattagtatttaaattaagaaatagaatattattagtaggtagggtttatatgtgaggtagaaagtgttagaatttggagaggaggttggaggagtaggtagggttttgttgtgttgggtgtgggagttgggaggggaggaagggtttggcgtgtagagatggacgttatatgatttttgtttttacggttaaggtgtaattgtttttttatcggttttgtaaaatgattgttattttgtaaaatttgggtaaagatattatattttttttgtttatttatttatttatttatttatttattttttgagatggagttttattttgttatttaggttggagtgtagtggcgcgatttcggtttattgtaagttttgttttcgaggtttacgttatttttttgttttagttttttaaatagttgggattacgggtattttttattatgttcggttaatttttttgtattgtttttagtagagatggggttttattatgttaggtaggatggttttaattttttgatttcgtgatttattcgtttcggttttttaaagtgttgggattataggtatgagttattatatttggttttttttgtttatttagaggagagaatttttttattaaataattattttatttttatattatttaagattttggaggggtatttttaaaaggtttatttgaaaattaattttgtttttttattttttttttttatttagggttattatgtgtatcgtgatatgttaggcgaaaaaggagattttattattttatttgaaataagttaaatttttggggaggtaatatattatgtaaagtatgaatgaagttaatataaatatttgagagtagattaaattgtattattttgtagtagtgttttatagttttttttgtgatttattaaaagttttaattttatagtagtttatgtattgagggaatagagaggtagtagaggggagtaaaatggtagagagaatatttgaaaagtttatattttattgtaggaagggaaatggagagataagagggataaagagaaagagaaggaaaggagggggttataaagaggatagaaaaaggagaattagatgaaggaagagaatggaagaaggggttaggcgtagtggtttatatttgtaattttagtattttgggaggtcgaggtaggcggattataaggttaggagattaagatcg

SEQ ID NO: 15 - DNA, 7148 bp, Artificial Sequence
  chemically treated genomic DNA (Homo sapiens)
ggttgtttagtaggatttattaaatttagttttttttttttattataatagtttttttttttgtatttagatgttagttttttttattatttagttattaggaggagagtgttgatatgtttggttaggtgatgcgtttatgttttatattttgaattagagtagatttttaattcgggtttggttttttttagtttggttgatttcggataacgtttttttttgtttatatgggtataatatttattatatatgacgtcgtggggattgaatattatgagtaatgtttatgtgcggcgtttggtataaggtaaagttttagtatttttagttgttattgttttttttattttattttcggggattaaggtttaggggagcgtggatattaggtaaaagttttagatcgtataggtagtatttgggttttaatatttttattattttgtttttttttgtttttttttttttttttttaagtttggaattttttaaaaaggaagaaagatttttgtaatttgagaagtatatttgtgtttttatatattttgaatttttttagagaggttgtttaggatagatgattttagagttggattttttggagttggattttcggtttataggagataattttttaatttagatatattgttattttttattaatatttttcgtttatatatttagagattattatttgaaattaggatgtagatgagttttagtttatttagtagtattttttttttgtttttttaaataatcgattattaattataatgatgtttttttttttttagagggaatttttaatttttttttcgtgaaatggagtggttagaatgatttttattgatagaagaggaaattgaggtttagtgaggggtatgaatgttttttttgagttttagggtattgggtaggagataggttttattacgggtttttttggataggggatttagggttaggttgggagaaatttttagttttagaagagagttttttgtttttttcgttggattaggtttttgtgtgattcgggatatggggaatagaggttttttgggaaggaaacggggtttttggtagtgttcgttgaggtttagttgttatttaggaaagggtttgtttataggagggcggtcggttgggggcgaaagtgaggttttgagaggaatggttagataggtaattatcgagatttagttttggtcgttttgtgatggttgttggaaatttcgttatgagttgattttacgtggaggtaggttatagttagtttttattttttttaggtagtttgtgggcgaattgagggattaggatagtatggattggtttggagttttagtaagttttgaatatgagaattggatattttatagatggaagtgtgaggtttagagagaggaggggtgggttaaaggtttttagtaaggattgagaggttttatttttttatgatagtgatggttttcggaggttggagtattttttatgtgttaggtttgtgttaagtattttatatataattttatgaagggttattatgagtgttttattttataaatgaaagaaatgaggtttagagaggtttaggtaattttttttagagcgttgtgggtgagggaaaaagatacgtttaggtagagggattgtggattttagttttttttatagtttatggattttttaggcggttttttagggtatatttgttttttgtttggtatatttggggatttttgtttaggcgttatagagtttatatgaattatatttgttttgggaaggcggtatttttattgttaagaacgtatttagagagtatttttaaatgttagagggagacgaattttttttttggggtaaaggagttggttttatttgttcggggatgggttttgggtttatttagttttaagttaaggtagggtaggggagtgttttgattttttgttttttagttttgttgtggataatttagggtgtttttaggtgggggttattggggagaaattggtttgtttgtttatcgatttgatggaagagggagaaaagacgacggtttatgttaattggggaagggcgagggtgtttgtatgttttaggtgggggagtcggagtttttttttttattaaatagacgataatttttgtcggttcgggatggggaggaagtaggtggaaattgggaataagttagtttgttttgtgggtttttttcgggtgtttgaaaacgcgaagatagaaggcgtttattttattagaggtgaggaaggcggttttggtttgatataaagttatcggtttgtttgagatttggtcgtatggatggtaaggaaagggtagtttttcgggggcggtcgtcgcgtttgtattcggggtcgtagttggcgcgtatttgtagttcggtcgggttcgtattttcgcggttggtagggcgcgggcgttaattagcggcggttttcgttattgtgtttgttaggcggtttcgcgattttggtttggggatttaagggtttgtattcgtttttttttttttcgtcgttttggttttttggatttggtgtttacggggagttagcgttttacggagagtcggagtcgtgtcgggttttgcgttaggtgttagggtttataagagttttttattttttggaaatttgtttgtgaatttatcgtaagcggagagggagaaattaggcggaggaataagtaaagggtacggtgtaaatcgaaattattcgataaatggaatttattattatttgaaatagcgggttatggtttcgtaatttgttcgagggtagtacgtgttgttcgttttcggttagggttttatttggttacgacgcgttgcgttttttcggagacgttttcggaggtgggagcgtttaggttggattattcgtttttttttagttttgttgttcgtgttagcgcgttcgagggcgcgcgggtttgggttcgtaatcgataattgttaggcgtaggtttttttaaaaggtttagtaagggatttttgtcgttttttttttcgatacggtttgagggcgtgttgtgaggtttcgaggtgggtaggggttagttttttcggtggtcggggtgagtttagagtttttcgtttttggagcgtacgcggggtttgatttcgtttggtaacgacgaaatggcgcgcgttgagtaggggttagatttatgatgagattttgcggttatcgtcggattttaagtttttttgttttcgaggtttggaatttattgttttgtatttgtcgagagtcggaggtaacgaaaatttagtttcgtttttaaagcggcggggaggtttagtacgcgttcgttttttagagtttagggaggtgtttggggcgataattcggaatgattgtggtttgatttttttcgttgtttttttaattgtagtcggtttttaggtttgttcgatagatttaggaggcgggagaggaaggggtgatttgtagtgaagtttaggagaggttgggttacgcggttgggagtgggagcggggattcggagtcgggcgggtaggtagtgttttggcgaagttgttcgcggtttttgcggcgtagtcggagcgtacgggtttaagaagaagtggggttggattcgtagaggttattttttattcgtatggagaaagaaaatttttttttttgaaagcgagggtttttagttttgtagttattgttgttttttttttgttatcgacgcgcgtatcgttttacgatgtaggatcgtggttatatgcgtaaaggaaaaaaagaaaaacgtattttgtaggtttcgtcgtgttttttaaagagttataggtcgttataacgaagaacgacgtcgcgaggtttgtaagattttgaaatttgttttgaggggagagtagagaggaaaggggttgttggttttaggttatttagggtttttaggagattttttttcgtttgttttcggtttggtataggggttatcgaggttgggattaaagtcgcgtagggttgggagtagtaaaggtcgtcggtcgggcgtggacgacgcgtaaaatttcgtgtggggtggaggtttttgggttagaataatgtgcgggacgagggaggtgagtaatttttttggggcggtttttagtgcggcgttatcggttttgagatttcgcggtttttagttcggggttgtagaagttataggttcgaagtagtaagagttggggaagttcggtcgcggttagcggggaggaggagcgaaggggttgcgttttagcgttagggagttacgattcgagagagggcggtaagggcgtttttcgtgggattcggacgttttaagtaaatttttagtatttgtttcgggtttttagagttttcgggggttttgggttgtggtattggggtttttttcgcggggtggcgtttttcgttttttttcgttgggcggttttcggtaggtttcgttttttttcgcgaacgttatcgaggtgttcgcgatgggggtttcgtcgattggttgtgcgacgcgtcgtttcgttagtttcgtttcgcgggtttcgggggtattaatttcgcgcgggcggtcgcggtttcgttatttgattttggaggatttgttttggggttgcggtcgcggagtcggggcggtcgcgggcgagtttcggggcgggaggcggcggtagcggtatagtttcgcgcgggtttcgtcgcggtttaggtagtcgggatagttacgaggggcggtcgtacgcggggtcgcgcgtcgaggatgcgggattagtcgggtaggttgcgggcggtcgtcgggttagcgaggtttcgtagcgggcgggttttggcgagtagtggtcgggcgtcgttttttgcgttttgaggttcgggtttcgtcgtttttgttttttcgtttttcgcggtagcggcggtcgaggaggcgttcgcgtcggtcgttttcgggggaagtcgcgtcgttttcgtttgttcggcgttttgacggtcgttgttatgcgtattttcgtagatttaagtattagtcgtcgttttatattttttttttcggtttttttttgcggcggcggcggcggtaagatgggcgagaatagcggcgcgttgagcgcgtaggcggtcgtggggttcggagggcgcgttcggttcgaggtgcgttcgatggtggacgtgttggcggattacgtaggcgagttcgtgcgtatcgatagttttaattttttttgtttcgtgttgttttcgtattggcgttgtaataagacgttgttcgtcgtttttaaggtgagtgcgggattcggggcgggagggcgtcggttttggggtttcgggcgtttgagttgcgggagttagagtttcgggagtagtggggatgggaggtgttcgagacgtcgcggcgatattcgggtattcggtttagtttggttgcgcgttcggtttcgggatttcggcgtttcgttttggatgcgttttgtaggaatgatttttaacggggttgtttcgttttatttgggttttggggcgttttgcgtagagacgttggtgcggaaatgggcggatggggttttgcgtttttttaattcggatcgtttagatatagttttgcgggtaacggagaagaggatttcgggataggggtaaggatatcgcgggtggggtgcgaacggtgaaagggtttatttttcgtttttagtattttttttttcgcgtcgtttcgtaaaagttttttgtttatattttcgggttttcgaaattttatcggacggcgttaggtcgggatcggggtattgttttttagacgtttgttcggggatattatgcgtttcgaatggcgagttgagattgggggatttttaattttggtagtttttagttatttagaggatttttttttttatgttagggagtaggcgattgttttatttttatttttttaagggggtagcgagatgaaacgaaaacgtttcggtttttttttaaattttttatagttgtcgtgagaaaagggtagggtaggaagggtcggcggttgggggtggtgttgttcgaggtggttggaagttgaggtcgtttttgtttttattaagacgattttaaatgggaaaaaaaggaagagtggttttttgaggtttttcgggtgatattttaaaatattagtgggggaaatttcgtcgggaggggcgggaggttcgtgtgattttaatcgttagatcggaggttttattgttatttggagtttaaaaggagtttttgaaattaaaagaagataggatgttgataggaaatttggtttttttaattagattttaaatattttttttttgaaatttttattatatggatttttagtttttgtacgcggcggttacgtttaaatagttgtgattttgtttaaagtttgatttttttttaaaaggtattcgttttttcgtgtttttgggggtgggggatttgggggagatggtgtttagggggatatcgttatttttattttgtaattttcggtaggtgtatttttttattattaaaagttttatttttattttaaaggggttttttggtggttttttttaaaatattagtgagttttgtattttgtattttttttgtataacgaatttaggttttgtagaggttaataaattgggtttggtttatattttagggttaaattttatgttttaaatagtttttgtataaattgagtgggggtagtagttttgttgttattattgttgttatttttttttatttggagatttcgttgttaggagtatgttgatttttttttcgttgtagtcgaagataataggggaattgtattttatattatagtgattgagttgatttatagttttggtttagattttattgaaaggatgattttttgggatatagtttatgtaagtagttgatttaggattttggtgtggaagttcgagattttatttttttgttttcgtgatatttgggggaaggtttttattgtttttaagttttttttttattttgtattggagaaatatttagtgtgtttgggatttgggggagttgtttagtttagtttttttttttttttttttggttattttttttttttttaagttgtttttttgtattttttcgtttcgtgtttttagg

SEQ ID NO: 16 - DNA, 7148 bp, Artificial Sequence
  chemically treated genomic DNA (Homo sapiens)
tttgaagatacggggcggggggatgtagggggatagtttagaaaggaagagggtgattagggaaaggaggggaggggttgggttgggtagtttttttaggttttaggtatattgagtatttttttaatgtagggtggagaagaggtttaaaaataataaagatttttttttaaatattacgaaaataagaagatggaatttcgagtttttatattaaaattttagattaattgtttatataaattgtgttttaagaaattatttttttaatgaaatttaagttagagttgtgaattagtttagttattatgatgtggggtgtagtttttttgttgttttcggttgtagcgaaagaggaattaatatgtttttagtaacgaagtttttaaatgagaaagagtaataataataataataatagggttgttatttttatttaatttatgtaagagttgtttagggtatgaaatttggttttgaaatgtggattaggtttagtttattggtttttgtagagtttaaattcgttatgtagagaaaatgtagaatgtaaaatttattggtgttttgaaaaaggttattagaaaatttttttaaagtgagagtggggtttttgataatggaaggatgtatttgtcgggaattgtaggatgggggtggcgatgtttttttaaatattattttttttaaattttttatttttaggagtacggagaggcggatgttttttgaaaaagaattagattttaaatagagttataattatttaaacgtggtcgtcgcgtgtagggattggggatttatatggtaaaaattttaaggagaaaatgtttgggatttgattaagaagattagattttttgttaatattttgtttttttttaattttaaagattttttttaagttttaagtgatagtaaaattttcgatttgacgattaaagttatacgggtttttcgtttttttcggcgagattttttttattggtattttaagatgttattcgggagattttaaagagttatttttttttttttttttatttagagtcgttttaatgggagtagggacggttttagtttttagttatttcgggtagtattatttttagtcgtcggttttttttgttttgttttttttttacggtagttgtgagaggtttaggggaaaatcgaggcgttttcgttttatttcgttgtttttttaaaaaaatgaaaatgaaatagtcgtttattttttggtataaagaaaaaggttttttaaatggttgggggttgttagggttaggggttttttaattttaattcgttattcgggacgtataatattttcgagtaaacgtttggagagtagtgtttcgatttcggtttagcgtcgttcggtaaaatttcggaagttcgagggtgtgagtaggaagtttttgcgaagcggcgcgggaggaggggtgttggaggcggagggtaggtttttttatcgttcgtattttattcgcggtgtttttgtttttgtttcgggattttttttttcgttattcgtagggttgtatttgagcgattcgggttaggggggcgtaaaattttattcgtttattttcgtattaacgtttttacgtaaggcgttttaaaatttaggtggagcggggtaatttcgttaaaagttatttttgtagggcgtatttaaaacggaacgtcgaggtttcggagtcgagcgcgtagttagattgaatcgggtgttcgggtgtcgtcgcggcgtttcgggtattttttatttttattgttttcgaggttttggttttcgtagtttagacgttcggagttttagggtcggcgttttttcgtttcgggtttcgtatttattttgaaggcgacgggtagcgttttgttgtagcgttagtgcgagggtagtacggagtagaggaagttggggttgtcggtgcgtacgagttcgtttgcgtggttcgttagtacgtttattatcgagcgtatttcgggtcgggcgcgtttttcgggttttacggtcgtttgcgcgtttagcgcgtcgttgttttcgtttattttgtcgtcgtcgtcgtcgtaggggaaggtcggggagggaggtgtgaagcggcggttggtgtttgggtttacgggaatacgtataatagcggtcgttagggcgtcgggtaggcggagacggcgcggtttttttcgggggcggtcggcgcgggcgttttttcggtcgtcgttgtcgcgagaagcgggaaagtagaagcggcggggttcgggttttagggcgtagggggcggcgttcggttattattcgttagggttcgttcgttgcgaggtttcgttggttcgacggtcgttcgtagtttgttcggttagtttcgtattttcggcgcgcggtttcgcgtgcggtcgtttttcgtggttgtttcggttgtttgggtcgcggcggggttcgcgcggggttgtgtcgttgtcgtcgtttttcgtttcgaagttcgttcgcggtcgtttcgatttcgcggtcgtagttttagaataaattttttagaattaagtggcggggtcgcggtcgttcgcgcggggttagtattttcggggttcgcggggcggggttggcggagcgacgcgtcgtatagttaatcggcggagtttttatcgcgggtatttcggtggcgttcgcggggaggaacggggtttgtcggaggtcgtttaacggggaggggcggaaggcgttatttcgcggaggaggttttagtgttatagtttagggttttcgagagttttgggagttcggggtaaatgttagaaatttgtttagaacgttcgggttttacggaaggcgtttttgtcgttttttttcgggtcgtagttttttgacgttggggcgtaattttttcgtttttttttttcgttggtcgcggtcgggtttttttagtttttgttgtttcgggtttgtgatttttgtaatttcgggttgggggtcgcggggttttagggtcggtgacgtcgtattgggagtcgttttaaagaggttatttatttttttcgtttcgtatattattttgatttaagagtttttattttatacgggattttgcgcgtcgtttacgttcggtcggcggtttttgttgtttttagttttgcgcggttttggttttagtttcggtggtttttgtgttaaatcggggataggcggaagggagttttttagggattttaagtagtttggggttaataattttttttttttttgttttttttttaaaataagttttaggattttgtaggtttcgcggcgtcgtttttcgttgtggcggtttgtggttttttgaaaaatacgacgaggtttgtaaaatgcgttttttttttttttttttacgtatgtaattacggttttgtatcgtgaaacggtacgcgcgtcggtggtaaaagaaaaatagtagtggttgtaaagttaagggttttcgtttttagaggagagaattttttttttttatgcgggtggaaagtggtttttgcgggtttaattttatttttttttgggttcgtgcgtttcggttgcgtcgtagggatcgcggatagtttcgttaaggtattgtttgttcgttcggtttcgggttttcgtttttatttttagtcgcgtggtttaattttttttgggttttattgtaaattatttttttttttttcgttttttaagtttgtcgagtagatttaggggtcggttatagttgggagggtaacgggaaagattaagttataattatttcgaattatcgttttagatatttttttagattttggggaacgaacgcgtgttgagttttttcgtcgttttggagacggggttagattttcgttgttttcggttttcgataggtgtaaaataatgaattttaagtttcggaagtaaagaagtttaggattcgacggtggtcgtaagattttattatggatttgatttttgtttagcgcgcgttatttcgtcgttgttaaacgaaattaagtttcgcgtgcgttttaggggcgaaggattttggatttatttcgattatcgggagagttggtttttatttatttcgggattttatagtacgtttttaggtcgtgtcgaaaggaaggacggtaaaggttttttattgaattttttaagagagtttgcgtttggtagttgtcgattgcggatttaggttcgcgcgttttcggacgcgttggtacgagtagtagaattagaggaaagcgagtgatttagtttgggcgtttttattttcgggaacgttttcgagaaggcgtagcgcgtcgtggttaggtagggttttggtcgggggcgggtaatacgtgttgttttcgagtaggttgcgggattatgattcgttgttttaggtggtggtaaattttatttgtcgaatggtttcggtttgtatcgtgttttttgtttgttttttcgtttgattttttttttttcgtttacgatgggtttatagataagtttttagagaatgagggatttttgtgggttttggtatttggcgtagggttcggtacggtttcggtttttcgtagggcgttggtttttcgtgggtattagatttaagggattagggcggcggggggagggggggcgggtgtaggtttttgggtttttagattaaggtcgcggggtcgtttggtaggtatagtggcgggagtcgtcgttagttggcgttcgcgttttgttagtcgcggaggtgcgggttcggtcgggttatagatgcgcgttagttgcggtttcgggtgtaggcgcggcgatcgttttcgaggagttgttttttttttgttatttatgcggttaggttttagataaatcgatggttttgtgttaaattaaggtcgttttttttatttttgataagatggacgttttttgttttcgcgtttttaggtattcggggaagatttatagaataggttagtttgtttttaatttttatttgttttttttttatttcggatcgataaaaattgtcgtttgtttgatgggagggagaatttcgatttttttatttggggtatgtagatattttcgtttttttttagttggtatggatcgtcgtttttttttttttttttattagatcgatggataaataggttagtttttttttagtggtttttatttaagagtattttaagttgtttatagtagggttaggaagtagaaggttaggatatttttttattttattttgatttagagttgggtaaatttagaatttattttcgggtaaatagagttagtttttttgttttaggaaggggattcgtttttttttggtatttaggagtgttttttaagtgcgtttttggtagtgagggtgtcgtttttttagggtaggtgtgatttatgtggattttgtggcgtttgggtagggatttttaggtatattagataaggggtaggtgtgttttgggaaatcgtttaagaggtttatgggttatggaaggagttggggtttatagtttttttgtttgagcgtgttttttttttttatttatagcgttttagggaaagttgtttaaatttttttgagttttattttttttatttgtaaagtggggtatttatagtggttttttatagaattgtgtgtaaagtgtttagtataggtttggtatatggagggtgttttagttttcgggagttattattgttatgaaaaaataagattttttaatttttgttgggggtttttgatttattttttttttttttgggttttatatttttatttgtgaaatgtttagtttttatatttaaagtttattaggattttaagttagtttatgttgttttgattttttaattcgtttataggttgtttgggggaggtaaggattggttgtgatttatttttacgtggagttagtttatagcggggtttttagtaattattatagggcggttagagttgggtttcgatgattgtttgtttgattattttttttagaattttattttcgtttttagtcggtcgtttttttgtgggtagatttttttttgagtagtaattgggttttagcggatattgttagggatttcgttttttttttaggaggtttttgttttttatatttcgaattatataggagtttagtttagcgaagagagtagaggatttttttttagaattgaaaattttttttagtttggttttaaattttttgtttagagggattcgtggtgaaatttattttttgtttagtgttttagaatttaaaggggatatttatgttttttattgagttttaatttttttttttgttaatggaggttattttaattattttattttacgggagggggattaaggattttttttaggaggggaggggtattattgtgattgatgatcgattgtttgaagaaatagaaagaaaatgttgttgagtaaattaggatttatttgtattttgattttagataatgatttttgaatatataagcgagaaatgttaatgaaaaatggtaatatatttgggttgaggggttgttttttgtaggtcgggggtttagttttagagagtttagttttggggttatttattttgggtagtttttttggaaggatttagaatgtgtgggagtataaatgtgttttttaaattatagagatttttttttttttttggaaagttttagatttggaggggagggagaaggagtaagggagagtagggtggtgagggtgttaggatttagatgttgtttgtgcggtttgagatttttgtttggtgtttacgtttttttgagttttggttttcgagggtaaaatgggaagaatagtaatagttgggggtgttgaggttttattttgtgttaggcgtcgtatatgggtattgtttatggtatttaatttttacggcgttatatgtggtaggtgttatgtttatgtaagtaaagaggaacgttgttcgaggttagttaggttagagagggttagattcgggttaaaagtttgttttggtttaaaatgtggggtatgaacgtattatttggttaagtatgttagtattttttttttagtggttgagtaatgggaagagttagtatttagatatagaggaaagagttattgtgatggggagagggagttgggtttggtaaattttgttaagtagtt

SEQ ID NO: 17 - DNA, 8543 bp, Artificial Sequence
  chemically treated genomic DNA (Homo sapiens)
ggaaggaaggaaggaagggaaaagaaaagaaaaagaaaaaaagaaatgagttgtttaatatttaaagttttgggggaaattagaattttaaaagtgtatttatggagagataaggagagtagggaagcgtatgttaagtttttatttattgagtaagtgtgttttgtatgttaggaattggttttggtataatattttttttaatttttttagtagttttttatattatttgttttttggggagataggataagtaattttatgggtagagttgggcgtttgtggataaaaaatattaggtcggatatagtggtttatatttgtaaattttagtattttggaaagtcgaggtgggaggattatttgagtttaggagttcgagattagtttgggttgcgtggtgaaattttatttatataaaaaattagttaggtatggtggtgtatgtttgtagttttagttatttaggaggtcgatgtgggaggattatttgagtttgggaggcggaggttgtattgagttgagatttaattattgttttttagtttgggtaatagagtgagattttgtttcgaaaaaaaaaagaagaaagaaaaagaaatattggattttgggttgattatgcgttgagtttatatgttttatatgttaagatttaaagtttaaaatgaattagtataaaatcgtttatgaatttatttgtaataaaaagtaattagtgtttttattttgttttgtttgtttagttggaggaaggtttttgagagtattttattgaatgattgagatattattagttatattatattagatatttgtatttttagttagagtttagttgagtttgaaattatagttttggatttttattttatttgaattggttttgtttggagcgattaattttatatatatattttagttttagataaagttagaaaattatattagaagggttagtttcgtttttgttttttagaatttgattgatttttaaatttacgtattaattttttcgtgggttttgtattaggaaggttaaattaaagtaaaataaaatatttttagggttttgtttgtttttttaaaatggttagtgttgtgattgattttagaattaggttttattttggagtatttaaaatttaggattatcgtttttcggggatttacgtttaattttttatattgggtttgtgtatatttttatttatagttttaggaagaaggattttaaaggtggttatagaagaatttataagttgtttttaggattggttttgttttagttgtatatgagttagagttattttttttaattaaaggtgattttttttttgtttttatttttttagttataagttaattgtttatgagattgttagatattagtttttttttttttattttgtgggatttttttatggaaagtgtttttatcgattttagggttttattttaattttttagttaattttttgttttagggtttgggtaggatatttttatttagggttttagatattttttgttttttgagaatttcgttaggtttagttagagatttattatttgtttttaaaattattttttttttatttcgaggtatatttttaggtttttaaggaaaaattagaatatggtagatggattttcgtaattgttttaaggtttttttttttaaaattataaagtaggtaggtgagtattttggaatgagtttttagtggttttttgggggtttggagaggggtttttaattttttgggtattatatgtgttagggggtggtaattttagttagaagtttggtatttagtttttaagttttgatattttgttttaatttattttgttcgtttattattggggtaatataagtttttatttttttttatttggttaatatttttttttcgttttggttagagtagatttttaggaatttaaattcgataacgaagtttttttgttaaaatttggaggttaaaagtttgggagataagggttttttttttatttgtagtggttttggttattagtttagttttgtttgcggatttagttttatttaggttttatttttttttattttattttttagtcggttaattatttcgttttttgttattagaatatatgtattggtaggttttttatttttgtatttattattttttttttttagaagagttttttttttttatttttttagtaaatttttgtttaatttttaaggtttagtttaaaggtttgtttttgtatgaagttttgttttatcgtcggtttagtttaagtaggttgttattatagatttattataaatatttattttttatggttttggaggttggatgtttaaggttaaagttaagttgttagtatttttaggttttggtgaggggttttttttttgtttgtagacggttattttttttttgtgtatgtttatgatattgtttttttgataaggttattaattttattaaattaggattttatttatatgatattattttattttaatgattttttaaaagttttatttttaaatatagttatatgggggttaggtttttaatataggaatttggggtagggatatagtttagtttataatattttcgtagataaatttgatttttgttttttttatagcgttattttgtttagggtaggatttttttttattatagtatatttatttttgatttttatttgtgtttcgtgtgtatttgatgaatgaatgaagttttattttttattttttttgttttttttttttttttagtagtttttgtgtgataatttattcgttttttttattgttttagtttttagaggtaggagttatttttttatgtatttttgggttttcggtattttgtatagggtaggttcgggtgggtgaattttggtttaattgtaggaggatttgtggtttttggggttggcgaatttcgggtcgggagttttattttttgttattgtcgtttttatatatttattagttttttattggataaagttttatttttattattgaggttttttttagttttacggggtagagttttcgatttttgggtaggtaatagtagttgtgtaaaaaaggttagatatcgttttttttttataattttataggtcgggaatcgtgtatgtatagtggcgtttttttgtttttaggtaggaaaagttattagttttagtatcgtagaaaaaaacgtaaatcgtttttggtgttttttgattttcgtttaggtttttttttataggtgaatgttatatgaatgggttttgtatttggtttagtaagtagtttttcggtttatatcgggatatttatttaacgtatttggtttttattttttttcgtttaaaagcgttaagttaaaaatattttgtttatgagttttggatcgaaaacgaagtagttgggttattaattattgggattatgttgaataggaatttgattaaagcgtagtgtgcgttgtttagatgaaattgtttttttattgcgatcgtcgtggaagttcggggttttttagcggtgtttttagttgtgtttttttcggggtttttgggcgggtcgtggcgttttgttaggtttaaggttattgtcggtgaagggggtttttttttatttgtaggtaagcgcgtttttagtcgggacgtaggcggcgttaggttttagcgttagtggcgaggggcggcgcgggtaaggataggagatatttgagggtttttaagattttatttgggtttagttgacggttcgtagtcgttatttcggtttcggtaaagaatgcgagggacgtacgtggttgggggtttcggtggtaagttttttttttcgtcgcggtgagagtattagttgtcgtatttaaggggttttagggtttggtcgtttcggtttttaggatttcggggattatagcgttcggcgaattattgggtagagttttttttgtgcgtgttcggatttggtagttcggcggtttggatattttcgttttcgtcgttggcgtttatttgaatggggaggcgggggaggaagcggtggtttcgggtttcgaggcgttgcggttttcgtttcggaatttcggttttagagttaagtttgttttttttttcggtgcgttttttttcgtgttcgtttcggcgtttagtttcgttagtttggggggtttcgcggtttcgtaggaaaaaaaatcggcgattttacgtcgggtaagtagcgtcggtttcgcgcgtttagtaagtcgcgcgtttcgatttggagaagtaattataaagaaagttttttagttcgggcggatcgatcggttaggttttttaggttttcgggtcgaggtcgttttcgtttttcgcggggttttagcgttttgcgcggcgtcgtttatgggatttcggcgtttttcgagaggtatttttgcgcggaattataggggtagtttggagattagagttaggagacgtagagttatcgcgtttaggattttttcgcgcgttttaaacggttttttatcggttttagtttcgttgttttgcgttgtagttttttcgggacgcgggttcgggataggtttggttttggttttgaaagagaattcgcgttttagtagtttaagattaagattcgtttttcgttttttatttttatttcgtgtagtttcgggatatttttgggttttcggtcgtggttggatacgggcgtttagggtaggtaggaggagggggttttcgttatcgattacgtgggcgcgggggcgacggtcgggtcgggggcggagtttggagcgagcgtcgcggttttgttgggcgcgttggaggcggtgggcgttgcgtcgcggtttgtttggggagcgcggcgttgtgtcgcgttggttcgtcgttttatgtcggtcgcgcgttaggatttagtaggcgtcgcgtcgtcgtagttcggggatagaggtcgtttcggattttagggggcgacgcggtttgtcgggtataaaagttgggtcggcgcgggtcgggttattcgcgattcggaggtgcgcgggcgcgggcgagtagggttttcgggtgggcggcggcgacgtttcgcgtaggttggaggtcgtcgaggttcgttatgtcgggagaattttaatttttttatggagtcggtcgatttttacgaggcggagtcgcggttttcgatgagtagttatttgtagagtttttcgtacgcgtttagtagcgtcgttttcggtttttttcggggcgcgggtttcgcgtagtttttcgttttatttgtcgtttcggagtcgttgggcggtatttgcgagtacgagacgtttatcgatattagcgtttatatcgattcggtcgtttttaacgacgagtttttggtcgatttgttttagtatagtcggtagtaggagaaggttaaggcggtcgtgggttttacgggcggcggcggcggcggcgattttgattattcgggcgcgttcgcgggtttcggcggcgtcgttatgttcgggggagcgtacgggttttcgttcggttacggttgcgcggtcgtcggttatttggacggtaggttggagtttttgtacgagcgcgtcggggcgtcggcgttgcggtcgttggtgattaagtaggagtttcgcgaggaggatgaagttaagtagttggcgttggtcggtttttttttttattatgtcgtcgtcgtcgtcgtcgttttcgtattcgtattcgtattcgtcgttcgcgtatttggtcgtttcgtatttgtagttttagatcgcgtattgcggttagattattatgtatttgtagttcggttattttacgtcgtcgtttacgttcgtgtttagttcgtatttcgcgttcgcgttcggtgtcgtcggtttgtcgggttttggtagcgcgtttaaggggttgggcgtcgcgtatttcgattttcgcgcgagtggcggtagcggcgcgggtaaggttaagaagtcggtggataagaatagtaacgagtatcgggtgcggcgcgagcgtaataatatcgcggtgcgtaagagtcgcgataaggttaagtagcgtaacgtggagacgtagtagaaggtgttggagttgattagtgataatgatcgtttgcgtaagcgggtggaatagttgagtcgcgaattggatacgttgcggggtatttttcgttagttgttagagagttttttggttaaggttatgggtaattgcgcgtgaggcgcgcggttgtgggatcgttttgggttagttttcggcggggatttagggagtggtttggggtcgtcggatttcgaggtttgttcgagtcgtgcgagttaggattaggagatttcggtgttttttgaaagtttggtttgtttcgcgtgttttttttttttttttgcgtcggatttggtgcgtttaagatgagggggttaggcggtggtttttttttgcgaggaggggagaatttttggggttgagttgggagttcggtaattttagtatttaggataattttgtgttttggaaatgtaaatttatcgttttaatgtttattgagtagggggagtaaatcgtgttttgttattttatttggaggttttttgtttttttttcgaggttatagtagatttttatgagagaaggaggggagtaggttcgtggtaggaggagggtttagggagttgagatttcgataagttcgttagttttagtcgtttttttacgtttgtttttagaaaggggtggaaatatagggatttggggtttggaatttaaggttgtttttttagttttatatgaaggtggagggtttttagttttacgttttttttattttttttcgtatatattttattttagtttgttataggttgggtttttttttggggcggaatttattgcgatgggggttattaggtgattagtgggagtttttatttcgagttatattagaaagttaggtcgtgggttagttttgaggatgtatatttttggtgggagagggagatttagagatttggttgtggggcgggtatggggggtgaagggttattgggatttttagttttgtttgtattgtatgtttttagtattgtttaggaatacgaagtacgattagtttattttagagggatcggagttatgataagttttttaaatattttgttttattagtcgatattaatatttgtatttggtttttgtgttttagtagtgttttgtgtaatgtgaatgtgcgcgtttttgttaaattattattttatttggtttttgttttgttttggttttgttcggatatttgttaaaatgagatttttcgtcggtagttgggggaagggtttgagattttttttttttttggttttgggattatttttgattttgggggattaatgaggtgaggggggtttttttttgtttttagttttttttagttttttcggtttgggttgtttataaggtttgttttttagaggttttggtttttggtcgggaagggaggtggtttttcgttaacgtattattggggttgggagtagggaaggacggtttggttttttttttttggggagaacgtagagttttattttagatgttttatgtattatatttataatataaatatattaaagttaatgtcggtgtttttttaaaattagaaagaagttatttttaaggttgtttgtgggttaggttatatttgtaaataatatagtattttttttggcggtaattttgatttttatgagttttttatttattttgagttttttttattttaagggggtgatttattttttttaggtaagataaataaatagtagaggataaggttttaaatggagtatgtttagagtttgaaggtagttttttggggttaggggagggggttgaaggggttattgggttgaggttttggcgaggttttttatttgtttcggggaggaggagagggagttttttgtttgaggggtaggtttggttaagtagttttaggtttaaggagttttttgtgtagatttttttgtaaattatttatagttgtagttttggttatttatatatatcgtagttttagattttagtaggattttcggttagtaggaagaggtttttagtggtaggattttttaatttttttttttttttttagattatgtggttatattttatttttgcgaggttcgaaggtagtttgaagagagagatttttttatttagttttttatatttgtttagttttagtttttataagaaagggggttgaggtaggtttgtaataggggtttggttttgttttatatattggttgtttaagaatttatttagtatttatattttttattgtatttattttagatttagtaggggattgagtgttggtgtgtttttaattttaatgagtattttgtaaggttaggtatttcggtatttttttagtagtagtgatagttaagtaagggagggtagtttttatttttgaattaataaggttcgggagaaagaggtttaggaggttgatggtgttttttagattttatttttat

SEQ ID NO: 18 - DNA, 8543 bp, Artificial Sequence
  chemically treated genomic DNA (Homo sapiens)
gtgagggtaaaatttgaaaagtattattagttttttgggtttttttttttcgggttttgttagtttagggataagggttgtttttttttgtttggttgttattgttgttaagggggtgtcggagtgtttgattttatagggtgtttattggagttgggggtatattagtatttagttttttgttgggtttgggatgaatgtagtggggagtgtggatgttgggtgggtttttgaatagttagtgtgtggggtaggattagatttttgttgtaggtttgttttagtttttttttttgtgagggttggggttgggtaggtgtggagggttggatggaggggtttttttttttaggttgttttcgggtttcgtaggggtagggtgtagttatatggtttagggaaagaggagagggttggagggttttattattggaggtttttttttgttggtcgagggttttgttggaatttggagttgcggtgtgtgtgagtggttagggttgtagttgtaggtgatttgtaaggaagtttgtataaagggttttttgagtttagggttgtttagttaggtttattttttaggtagaggatttttttttttttttttcggggtagataagaagtttcgttaaggttttagtttagtaatttttttagtttttttttttgattttaagagattgtttttaggttttggatatattttatttggagttttgttttttgttatttatttgttttgtttgggggaagtaagttatttttttagggtaagaggggtttaggatggatggagagtttatgaaagttaggattgtcgttagggaaaatgttgtattatttataaatgtgatttggtttatagataattttggaagtagtttttttttggttttaaaaagatatcgatattgattttgatatgtttatattatagatataatatataaaatatttagagtgagattttacgttttttttaaaagaagagaattaagtcgtttttttttgtttttagttttagtgatgcgttggcgggaggttattttttttttcgattaggagttagggtttttgggggataagttttgtgggtagtttaggtcggaggggttggggaaagttgagggtaaaggagaattttttttattttattggttttttaggattaaaagtaattttaaaattaaaaggaaagggagttttagattttttttttagttgtcgacggagagttttattttggtaagtattcgagtaaaattaaaataaaataaaaattaaataaaatggtggtttagtagagacgcgtatatttatattgtataaggtattgttggggtatagaggttagatataagtgttgatatcggttgataaagtaaaatatttggaaagtttgttataatttcggtttttttgggatggattgatcgtgtttcgtgtttttaggtaatgttgaaggtatatagtataaataaggttgagggttttagtggttttttattttttatgttcgttttatagttagatttttaggttttttttttttattaggggtatatatttttagagttgatttacgatttagttttttggtgtgattcggggtgggggtttttattggttatttggtgatttttatcgtagtgagtttcgttttaaggggaagtttagtttatagtaggttggggtggggtgtgtgcggagggaggtgggagaggcgtggaattagagattttttatttttatgtagaattaggggaataattttaggttttaagttttaagtttttatgtttttatttttttttaaggataggcgtggaggagcggttggggttggcgggtttgtcgggattttagttttttgagttttttttttgttacgggtttgttttttttttttttttatgggggtttgttgtagtttcgggaaggaggtaggaaatttttaaataaaatgataaggtacgatttgttttttttatttagtaggtattggagcggtgagtttgtatttttaaggtataaggttattttaaatattagagttgtcgggtttttagtttagttttaagaattttttttttttcgtagggagaagttatcgtttggtttttttattttagacgtattaagttcggcgtagaggaagggaggggatacgcggagtaggttaggtttttaggaggtatcggaattttttagttttggttcgtacggttcgggtaagtttcgagattcggcgattttaaattattttttgggttttcgtcggaggttggtttagggcggttttatagtcgcgcgttttacgcgtagttgtttatggttttgattaaggagttttttggtagttggcggaagatgtttcgtagcgtgtttagttcgcggtttagttgttttattcgtttgcgtaggcggttattgttattggttagttttagtattttttgttgcgtttttacgttgcgttgtttggttttgtcgcggtttttgcgtatcgcgatgttgttgcgttcgcgtcgtattcggtattcgttgttgtttttgtttatcgattttttggttttgttcgcgtcgttgtcgttattcgcgcggaggtcggggtgcgcggcgtttagttttttgagcgcgttgttagggttcggtaggtcggcggtatcgagcgcgggcgcggggtgcgggttgggtacgggcgtgggcggcggcgtggggtgatcgggttgtaggtgtatggtggtttggtcgtagtgcgcgatttggaattgtaggtgcggggcggttaggtgcgcgggcggcgggtgcgggtgcgggtgcgagggcggcggcggcggcggcggtatggtaagggaagaggtcggttagcgttagttgtttggttttatttttttcgcggggtttttgtttgattattagcggtcgtagcgtcggcgtttcgacgcgttcgtataggggttttagtttgtcgtttaggtagtcggcggtcgcgtagtcgtagtcgggcgggggttcgtgcgttttttcgggtatgacggcgtcgtcggggttcgcgggcgcgttcgggtagttaaagtcgtcgtcgtcgtcgtcgttcgtggggtttacggtcgttttggtttttttttgttgtcggttgtgttggaataggtcggttaggaattcgtcgttgaaggcggtcgggtcgatgtaggcgttgatgtcgatggacgtttcgtgttcgtagatgtcgtttagcggtttcggggcggtaggtggggcgggaggttgcgcggggttcgcgtttcggggaaagtcgaaggcggcgttgttgggcgcgtgcggggggttttgtaggtggttgtttatcgggggtcgcggtttcgtttcgtagaagtcggtcgattttatgggggagttagagttttttcggtatggcgagtttcggcggtttttagtttgcgcggggcgtcgtcgtcgtttattcggagattttgttcgttcgcgttcgcgtattttcgggtcgcgaatggttcggttcgcgtcggtttagtttttatattcggtaggtcgcgtcgttttttagagttcgaggcggtttttgttttcgggttgcggcggcgcggcgtttgttgggttttagcgcgcggtcggtatggggcggcgaattagcgcggtatagcgtcgcgttttttaggtaggtcgcggcgtaacgtttatcgtttttagcgcgtttagtagagtcgcggcgttcgttttaagtttcgttttcggttcggtcgtcgttttcgcgtttacgtggtcggtagcgggggttttttttttttgtttgttttaggcgttcgtatttagttacggtcgggagtttaggagtatttcgaggttgtacggggtaggggtggggggcggagggcgagttttggttttgagttgttggggcgcggatttttttttaaagttagaattaggtttgtttcggattcgcgtttcggggaggttgtagcgtagagtagcggggttggggtcggtggggggtcgtttgggacgcgcggagaggttttgagcgcggtggttttgcgttttttagttttgatttttaggttatttttgtgatttcgcgtagaggtatttttcggaggacgtcggggttttatgggcggcgtcgcgtagggcgttaggatttcgcggggagcggaggcggtttcggttcgggagtttggaggatttggtcggtcgattcgttcgggttggaaaattttttttataattatttttttaggtcggagcgcgcggtttgttaggcgcgcggggtcggcgttgtttattcggcgtggagtcgtcgatttttttttttgcgggatcgcggggttttttagattagcggagttggacgtcggggcgagtacggggaggggcgtatcgagggaggagataaatttaattttggggtcgggatttcgaggcgggggtcgtagcgtttcgaggttcgaagttatcgttttttttttcgtttttttatttaggtgggcgttaacggcgggagcgagggtgtttaggtcgtcgggttgttaggttcgagtacgtatagggagaattttgtttagtggttcgtcgggcgttgtagttttcgggattttagggatcgaggcggttaggttttggggttttttgagtgcggtagttaatgtttttatcgcggcgggggaaggagtttgttatcgagatttttagttacgtgcgtttttcgtattttttatcggggtcggggtggcggttacggatcgttagttgggtttagatggagttttgggagtttttaagtgttttttgtttttgttcgcgtcgtttttcgttattggcgttgaggtttgacgtcgtttgcgtttcggttagaggcgcgtttgtttataggtgagggaagattttttttatcgatagtggttttaggtttggtaaggcgttacgattcgtttaggagtttcggagggggtatagttaaaaatatcgttggagagtttcgagtttttacgacgatcgtagtaaagaagtagttttatttgggtaacgtatattgcgttttaattaagtttttatttaatatagttttagtgattaatagtttaattgtttcgttttcggtttagagtttataaataagatatttttagtttgacgtttttggacgggagggagtaaaaattagatacgttaaataaatatttcgatgtgagtcggagagttgtttgttgagttaaatgtaggatttatttatatagtatttatttgtggagggagatttggacggaaattaaaaagtattaagagcgatttgcgtttttttttgcggtgttaaaattaatggttttttttatttaggaataaagaaacgttattgtatatgtacggttttcggtttgtggagttgtgggaggaaggcgatgtttggttttttttgtatagttgttgttgtttgtttagagatcgggaattttgtttcgtaggattggaagaaattttagtaatgggaataagattttgtttaatagggggttgatgaatgtgtgggggcgataatggtaaggagtgggattttcggttcggggttcgttaattttaggggttataggtttttttataattgaattagaatttatttattcgggtttgttttgtgtagggtgtcgagagtttagggatgtatgagagggtggtttttgtttttgggaattgggatagtgggagagacggataagttgttatatagaggttgttgggaggaaggaggagatagaaggagtaggggatgggattttatttatttattaaatgtatacgaggtataaatgggaattaagggtggatgtgttgtgatgaagagaagttttgttttgaataaggtggcgttgtggaggaggtagagattagatttgtttgcggaggtgttatggattgaattgtgtttttgttttaaatttttatgttgaaggtttaatttttatgtgattgtatttggagataaggtttttaggaagttattaaagtgagatgatgttatatgggtagggttttaatttgataggattggtggttttattagaagaataatgttatgggtatgtatagaaaggaggtggtcgtttgtaagtagggaagaggttttttattagaatttgagggtgttggtagtttggttttggttttgggtatttagtttttagaattatgagaaataaatgtttatggtaggtttatgatggtagtttgtttggattgaatcggcggtgagatagggttttatgtaggagtagatttttgagttgggttttgaaagttgagtaggaatttgttggaaggataagggaggaaggtttttttaggaggagggaatggtaagtgtaaaggtggagagtttgttagtgtatgtgttttggtaataaagaacgagatggttggtcggttggagagtggggtgagggagggtggggtttagataaggttggattcgtagatagggttgggttgatggttaaggttattgtaggtgaagggggaatttttattttttaggtttttgatttttagattttagtaggggagtttcgttgtcggatttgggtttttgagaatttattttggttaagacggagagggggtgttgattagatgggaaaggatggagatttgtattgttttagtaatgagcgggtagggtagattagaataagatgttaggatttgggggttgaatgttaggtttttggttgggattattattttttgatatatataatgtttaggaaattggaggtttttttttaagtttttaggaggttattggggatttattttaggatatttatttgtttgttttgtggttttggaggggaagattttggagtagttgcgaagatttatttattatgttttggtttttttttggaagtttaaaagtgtatttcgggatgaggaggaaatggttttgagggtaagtggtaggtttttggttaggtttggcggggtttttagaggatagggggtgtttagggttttagatagaagtgttttgtttaagttttaaagtaggaaattagttggggagttggggtgagattttggggtcgatggaggtattttttatgggagagttttatagggtaagggagagggggttgatgtttgatagttttatagatagttggtttgtggttggagaagtgggagtaaaggagaaattatttttgattgggagaagtggttttggtttatgtgtaattgagataaagttagttttaagagtagtttgtaaatttttttgtgattatttttaaggtttttttttttgaggttgtggatgggggtgtatataggtttagtgtggggggttgagcgtgagttttcgggaaacggtggttttgagttttggatgttttaggatgaagtttgattttggagttaattatagtattaattattttgagaagataaatagagttttagaaatgttttattttattttggtttaatttttttaatgtaaggtttacgagagaattagtacgtaagtttggaaattaattaaattttgaagagtaaaaacggaattaatttttttgatgtagttttttgattttatttgaagttgaaatgtgtgtgtaagattggtcgttttaaataggattaatttagataagataaaagtttagaattatgattttaggtttagttgagttttggttaggggtataagtatttaatatggtatagttaataatgttttaattatttaataagatatttttaaaggtttttttttaattagataaataaaataaaataaaaatattagttattttttgttataaatggatttataaacggttttatattgatttattttaggttttagattttgatatgtaaagtatatgaatttaacgtataattaatttaaagtttagtgtttttttttttttttttttttttttttcgagatagggttttattttgttgtttaggttggagagtagtggttggattttagtttaatgtaattttcgttttttaggtttaagtgatttttttatatcggttttttgggtagttgggattataggtatgtattattatgtttggttaattttttgtatagatggggttttattacgtagtttaggttggtttcgaatttttgagtttaagtgatttttttatttcggttttttaaagtgttgggatttataggtgtaagttattgtgttcggtttagtgttttttatttataggcgtttagttttatttatgagattatttattttgtttttttaggaggtaggtggtgtagggagttgttgggaggattagggagaatgttgtgttaaggttagtttttggtatgtaggatatatttgtttagtaaataagagtttggtatacgtttttttattttttttgtttttttataagtgtatttttgaggttttagttttttttaaaattttgaatattaagtaatttatttttttttttttttttttttttttttttttttttttttttttttt

SEQ ID NO: 19 - DNA, 6270 bp, Artificial Sequence
  chemically treated genomic DNA (Homo sapiens)
attagtatagtttgagtcgagtttgtggagagagttagggtttgaggagtttgatgggagggtttgggaggtaaggttaggtttatttagttggatagagttatttgagaagaagagttagttttaggaggaagagtaggaggattattggattaggataggggaaaaaggaaaaagtcgttaaggtatgtataagtattttttggtattttgggttaattgttagaggaagttgatgggattagttttagtttttgttttgtgtttttgtttttatgggtcgtttttttggttgcgtgttttgggatagtattattttagagttagtattgttggtagatgtagggtaagggcgggagtaagggggtggtggaggggtagtggtgttaagatattattttttattatttggaatattgtgaggatataggtaggtaagatgtcgttatttttagttttggtttgacgttaatatttttgttttgtggttgttatttttttagataggttggaagttcgttatttaatagggacgttgagttgggaggcgggttatttaatagttgtgtgtttttgggtaagttattttatttgtttagtattttgagaaagaaagagagttggatttaattttaaatagttttttaattttttaattttaggttgttttaaaaggtagaggttgttagttttgtttaagttttatatgtgttttttgggttttttttttttagtatatatatttttttttttttttttttggattgttttaggtttttttttgttgttttatttgagtatgttttgttttttattttttttattttatgaaggtatttgttttttaggagtattttttttttttgtgatatttgttgatttttttaatttggttaaatgggtaaatgtgggtttttttttgggtaataaatatttatttttaatttggttatttttcgttttaattttgttagttattttaattttaggagttttatatgttttgattttagggaatttgggaatattttgaaagttattgaaattgtagttgtttatgtatttatttattaatgtggttatacgataaatttttttgtgattattttgttaaagattttgttatatgttgtggaaatagtaaatttttttttgatttttttaagttagtatagattttaaatatttttttttattgtttttataaagatatttatttgtgttaatttgtttgtttttttttttttttttgagacggagtttagttttgttgttaggttggagtgtagtgacgcgattttggtttattgtaatttttgttttttaggtttaagagatttttttgttttagtttttcgagtagttgggattgcgggtacgtgtcgttatatttagttaatttttgtattttttttttttttagtagagatggggttttattttgttagttaggatggttttgatttttcgatttcgtgatttgttcgttttagttttttaaagtgttgggattataggtgtgagttattgtattcggttttgttttttattttaatttaggaaatatggttattatagttgaagaggtttaaaagatgtaattgattttatttttaaagagtaaatagtttgttaggggaacgaagttaaggatacgtacggtatatatatgtgtgcgttttttggttttatagattatttatgttttgttggaattattgtttgtgggtttttttgttgggtagtgagttttattggcgagggttaaatttaatatatttttagattttatgtagtgttttatgagtatttatatgtttaaaaatgtttgttaaattgacgtattatattaggtagtaggtagtgtttgtttaggagatatagataaaattgtaatgagaggttagaggaagagaagaaggagattttatatttattaagattagatgtatgatatatattatgttatttatagtttaaattaaataattttatgaaggaggtattattattgttattttgtaaggaagattaagtaatttgttagggttatggagttggttagtgacggaggttagatttgagtttagtttttttttaatattttatagttatgtttagttatttttttattgggaaagttttgatttattaaggaggtggtattggaaggaggtttgttataaagttattaagataataaatatgtattattttagttaatttaaagaggtagtaattgtagtggttaaggaaaaatgattttgttgattcggtagagtttttttttttttttgagtaagaattttttagtcgttgattggtattgttttttttattttttatttttgtttagagtttttttttttgtttagagttttttttattttattttgatatttagagttttgtttgttttagttaaatttttgttattgggaaatattgaggttagtatgttagtaacgttagtattagtcggggaggttagggtagagatttattttattatggttaaagttgttgatttttttattttttgcggttttgtttgtatattttttatatttttttgtgtttagtttattgaagttattgatgtagatttttttttttttacggtggttaaatgagggttaggaaggtttttcgagttatatagtaatttttttttatttttttagttagagacgaattaggtattttttttggatgattttgggtagtttagttttttagttttgttttttttgtttataaagtaggaataaaaatattgtttgttttgtttattttttcgtataatttatagggaaagagtatgaaaaagtgtaggttttaaggattgaaaaagtattaatttattagaaagtataaggtttatttattattattattttaaagtaggggagggaatagaatttttttttatggagataaggttttggatttagtattggtaggttgtttattttttttggaattgtattgtaagattttattttagttaggttttttttttttttttttagatgtttcgtaggagtttgtcgagagttagcgttgtgagaggttgttttttgttgtttatttgagttcggattatagtagtttttcgagttcgaaatattggggttaatattgttatttggtggttaatataagtattgttattaaattgagagtttagttttgaaatggagaaatttttttaatttttgatatttgtttttgggttatacgtagatttttttatattaggttattgtgtttttagataaagtatatttggttatgttttaagttatgtatagagagtatttggggtaggtgttggggtagggaggatgtaaggaatatgttaatcggaatatgttaattagaatatgtatttttaaaattttaatgtttaatgcgatatatattttttttgtatttgttttattgtggtttatttatagtgaattattttttgtttggtttaatttataaaaatttttggtttttttggggtatttatagtatttgttggttataaaagagttagtaatatttttatgtgtttttttttttttttttttaattggatttataattttttttggagatgaaatttaataggtaaaagtagtattagagtaggtgtttttgaaaggaggtagtggggagtttttaaaggaaagagaaaagggaagaggagagttagtatagaataaagaattgtagagagggagttatgggttttttttggagattttaaaatagagttttaggaagaggtgatgatataagaggttttttaaattttataagaggaagtagatttaagagatacgtattggagattagagagcggttatgtaaaaggaaagatagtaaacgagttgtagtaagtttttaagttttgtagtttaggtataggaaattagaggtagagttttaggtttagggtgaggggcgaagtattagtttgagttttttgtagtatagagtagttggaagagagaagtgttggagttatcggaggattatggttgtttatttcgagggtagtaatttgtttaggtttgcggtgtaaggtttaagttttgattaggtgttttggttaagtttagggagttaggaagtgtattaggttgttagaggtagttagggttggaaacgtattaatatgtgggttattgtatagtttttgtgtaaaaatttagtaaatgagtatgttttggagtattacgtaggttcgcgtgtagagtttgtttttaggatttattattattttttagattttttaaaaaataaattttggtttatatttagagaatgttttgggaggtggggttataaaagaaatttttttttgggggtaggtggagtttagtagtaggggagagttagaggaaggcgtgttaagggaggaggtgagatttaattgagggtaggtattggaagagggttttttttttttattttaatttggaattttattttgtatagaatttttttaaagtcggagggaggaggttgtttagagtggggtgttgttttttgcgaggatttggagttttttggttttttagtagggagtggagaggtatttttagaagtattagtttcgggtatttttagaattttggtttggtttttgattaaggagtgtttttaattgttgaataggttaggagtcgtttttttttaaggtttatatttttttttttggggtgtgttttgtttttttttgagttattttaaggggagagaggggaaaaaagggaagagaagagaggtattgattatagaggaaggaaaaggaagtagagtagaggggggagagaggttatataggagtgggtgatagaggagattgtagagggtaggtttagggtagaagatcgagagagggtaggtttaggttaggaggaggtagagagagggtagtcggagtattttaaggggtgttttaagagtaggtgggggcggggagtcgagggggcgggtcggttatgttttacgggatttattacgagtgtgagtttcggggtggttagtagttattcgagtttttagggggtcgagttgggttcggggagttaggggatatgtgtgagtatgaggtttttattgattttttcgtttatatcgagtttggggaagagtagttttttttcgatttttttgtcgtgaagttagcgtttgaggttagaggttttaagggtttcggaatttttgtttttttttattatttgtcgtttgattttcggttttttgtttattttttatatattttcggtttagataggaaggcgttggggtttggtatttatagtagtttagggagttacgattttagggttgtggcggtgaaggaggagtttcgggggttagagggtagtcgagttgttagtcgaggtagttataattttttgtagtattaagtggtatattgtgggtagatagttatgtatttgtttttaattttggtagtattcggttagtttttgcgcgtttttaaggtaagagtaggttagttttttttttttttgttcggggttggagaggttggtgtggataggattttgtgtttcggtttatgttgttgagtttgtgtttggtgtcgttttgtgaaatggatttaatttatagttttttgtgtttatattttattatgatttttttttttttttttgtgaatttatttttattttgaatttttatttaaagtttttgtggtaagttgatttatttgattttaggtttttatcgttagtttttttgttgtttattatgttttttttttttgtttttttgtcgtttgtttttgtgagaaatgtttattggttatagaacgggagatttaaggtagattgagggaaagtgtatttagaaagtgtgagagtattggttgggtgtcgtggtttatgtttgtaattttagcgttttgggaggttaaagtaggaggttcgtttaaggttaggggttggagattagtttggataatatagtaaggttttatttttataaaaaaagaaagaaagaaagtgtgagaatatgaaagggagttttggttttaagtagaggattttgtgtatttgggttattattttttagaagtagagcgatgatagttttgatttgagagataggagttggttttgagttttgtatttttttgacgtattaagtgtgttttggttgtcgagattttcgtttcgttttcgttttgttttttggttagtttttattttttcgttttttcgtgtttttttttttagg

SEQ ID NO: 20 - DNA, 6270 bp, Artificial Sequence
  chemically treated genomic DNA (Homo sapiens)
tttggaggggaaggtacggagagacggagaggtgagggttggttaggaggtagagcggaggcggggcgggaatttcggtagttagggtatatttgatgcgttaaaggaatataggatttagagttagtttttgttttttaggttaaaattattatcgttttgtttttgggagatggtgatttagatgtatagggttttttgtttgagattaaaatttttttttatgtttttatattttttttttttttttttttgtaaagatggagttttgttatgttgtttaggttggtttttaatttttggttttaagcgaattttttgttttggttttttaaagcgttgggattataggtatgagttacgatatttagttaatgtttttatattttttgagtatatttttttttaatttgttttgagtttttcgttttatgattagtagatattttttatagaagtaggcggtagagaaataagaggagggggtatggtgagtagtagagaggttggcggtgggggtttgagattaagtaggttagtttgttataggggttttgggtggggatttagggtgggaatgaatttatagagaaggaaagggaggttatggtggggtgtgaatatagaggattgtgggttgggtttattttatagagcgatattaagtataggtttagtagtatgagtcggggtatagggttttgtttatattagtttttttagtttcgggtaggagggaggagggttggtttgtttttattttgagaacgcgtagaggttggtcgggtgttgttagagttgggggtaggtgtatggttgtttgtttatagtgtgttatttggtattgtaggggattgtagttgtttcggttggtagttcggttgttttttggttttcggggttttttttttatcgttatagttttggggtcgtagttttttgggttgttgtagatgttaggttttagcgtttttttgtttgggtcgaaggtatgtggagggtaggtaaagggtcgagggttaggcggtaagtagtgggggaaggtaggggtttcggggtttttgaggtttttggttttaggcgttggttttacggtaaagagatcggagagaagttgtttttttttagattcgatgtaggcggagaggttaatggaggttttatgtttatatatgttttttagtttttcgggtttagttcggttttttgagaattcgagtggttgttggttatttcggggtttatattcgtagtaggtttcgtgggatatggtcggttcgttttttcggtttttcgtttttatttgtttttgaggtattttttggggtgtttcggttgttttttttttatttttttttgatttgggtttgttttttttcgattttttgttttagatttgttttttgtagttttttttgttatttatttttgtgtggttttttttttttttttgttttgttttttttttttttttttgtagttaatgtttttttttttttttttttttttttttttttttttttggggtgatttagggaggggtaggatatattttagagggagagatgtaagttttagagaaaggcgatttttggtttatttagtagttggggatattttttggttagggattaagttagggttttggagatgttcgaagttgatgtttttgggaatgtttttttattttttgttgggaggttaggggattttaaattttcgtagagggtaatattttattttgagtaatttttttttttcgattttgaaaaagttttatgtagaatgaggttttaagttagagtgaagagagaaagtttttttttagtgtttatttttagttgggttttatttttttttttgatacgtttttttttggtttttttttgttgttgggttttatttatttttaagagaaagttttttttgtagttttattttttagagtattttttgagtgtaggttagggtttgttttttgaggggtttagggagtagtgataggttttaggaataagttttatacgcgagtttgcgtggtgttttagagtatgtttatttgttaggtttttgtataggagttgtgtaatagtttatatgttagtgcgtttttagttttagttatttttagtagtttggtatattttttaattttttgggtttggttaaagtatttggttaggatttgggttttgtatcgtaggtttaggtaggttgttgttttcggagtagatagttataatttttcggtggttttagtattttttttttttagttgttttgtgttgtaagaggtttaggttggtgtttcgttttttattttgggtttgaggttttgtttttggttttttgtgtttgggttgtagggtttaggagtttgttgtagttcgtttgttgtttttttttttgtatggtcgttttttgatttttaatgcgtgttttttgggtttatttttttttgtgaggtttgagaagttttttatgttattatttttttttggggttttgttttagggtttttaggagaagtttatggttttttttttgtaattttttgttttgtgttggttttttttttttttttttttttttttttgggaattttttattatttttttttagagatatttgttttggtattgtttttatttgttgaattttatttttaaaagggattgtaggtttagttggggggggggggggaaggatatatagaaatgttattgatttttttatgattagtaagtgttatgggtgttttagagggattagaagtttttgtaagttgggttaaataaggggtggtttattgtgagtgggttatagtaggataagtgtagagaggatgtgtgtcgtattgaatattaaaattttaaaaatgtatattttgattagtatatttcggttagtatattttttatattttttttattttaatatttattttagatgttttttgtgtatgatttgagatatggttagatatgttttatttgaaagtatagtgatttggtgtggggagatttgcgtgtaatttagagatagatgttaggaattagggagatttttttattttaaagttgagtttttagtttggtggtagtgtttgtgttgattattaggtggtaatattggttttaatatttcggattcggagggttgttgtggttcggatttaggtggatagtagagggtagttttttatagcgttggttttcggtaggtttttgcggggtatttggaaggaggaagaggaaatttggttgggatggggttttgtagtgtagttttagggagaatgagtagtttgttagtattgggtttagggttttgtttttatgaggagaaattttgtttttttttttattttgaaataatgataatgaataggttttgtgttttttgataaattaatgtttttttaatttttgaaatttatatttttttatgttttttttttgtgggttatgcgggaaggtaggtaaggtagatagtatttttatttttattttataaatagggaaaataaggttgagaggttgagttatttaaggttatttaaggaggatgtttggttcgtttttggttgaaaggatgggaaggggttgttatgtgattcggagaatttttttggtttttatttggttatcgtggggagggggaagtttgtattagtagttttagtgaattgggtataggaggatgtgggaggtatgtaaatagagtcgtaggaaatgagaaagttagtagttttagttatggtgagataaatttttgttttggttttttcggttagtgttgacgttgttggtatgttgattttagtgttttttagtaataggggtttggttggggtaggtagggttttggatgttagggtagggtagggggagttttggataggaaggggagttttggataggaatgggaggtggggagggtagtgttagttagcggttgggggatttttgtttaggagaggaaagaagttttgtcgggttagtaggattatttttttttggttattgtagttattatttttttggattaattgaaatgatgtatgtttgttattttagtgattttgtaataggtttttttttagtgttatttttttggtgaattaagatttttttagtaggaaggtaattgagtatggttgtgaagtgttaagggagaattgggtttaaatttggttttcgttattgattagttttatgattttggtaagttatttaattttttttgtaaggtggtagtagtaatattttttttatagggttgtttaatttaaattgtgaataatataatgtatgttatgtatttggttttagtaaatgtgaagttttttttttttttttttttgattttttattgtagttttatttgtgttttttaaatagatattatttgttgtttggtgtggtgcgttagtttgataaatatttttgagtatataggtatttatggggtattgtatggggtttggggatgtgttgggtttagttttcgttagtagggtttattgtttagtaggaaggtttataggtagtggttttaataaggtatgggtggtttgtagagttaggaagcgtatatatatgtgtgtcgtgcgtatttttggtttcgtttttttggtaaattatttgttttttgagggtagggttagttatattttttggatttttttaattatggtgattatattttttgaattaaaatgaaggatagggtcgggtgtagtggtttatatttgtaattttagtattttgggaggttgaggcgggtagattacgaggtcgggagattaagattattttggttaatagggtgaaattttatttttgttaaaaaaaaaaaaaatataaaaattagttgggtatggcggtacgtgttcgtaattttagttattcgggaggttgaggtaggagaattttttgaatttgggaggtagaggttgtagtgagttaagatcgcgttattgtattttagtttggtaataaagttagatttcgttttaaaaaaaaaaagaaggataggtaggttgatataggtgaatatttttatggagataatggaagaaaatatttgaagtttgtgttgatttagaaaaattaggaaaaaatttgttatttttatagtatatagtaaagtttttgatagaatggttatagaaagatttgtcgtgtgattatattaataaatgaatgtataagtagttataattttagtgatttttaaaatgtttttaaattttttgaagttagagtatgtgaaatttttaggattaaagtgattggtagggttaagacgggaaatggttaggttaaaagtaaatgtttgttgtttaggaggagatttatatttgtttatttgattaggttgaaaagattagtaggtgttatagaaagagaaggtgtttttgaaggataagtgtttttatggagtagaagggatgagggataggatatgtttaaatggggtaatagggaggagtttggggtagtttagggaagggaaaggaaaggtgtgtgtgttgggaaagaggggtttaaagggtatatgtgaggtttggataagattggtagtttttgttttttgggataatttaaagttggaagattgaggaattgtttgagattaggtttagtttttttttttttttaaaatgttaagtaggtgaggtgatttgtttaaggatatatagttgttgagtggttcgttttttagtttagcgtttttgttgaatggcgagtttttagtttgtttggaagaatgatagttataaagtaggagtgttggcgttaggttaggattgggagtggcggtattttgtttgtttgtgtttttatagtgttttagatggtgaagggtgatgttttaatattattgtttttttattatttttttattttcgtttttgttttatatttgttagtagtgttggttttggaatggtattgttttaggatacgtagttaggagggcggtttataaagatagggatataaagtaaggattggggttaattttattaattttttttagtagttagtttaaaatgttaggaagtatttatatatattttaacgattttttttttttttttttgttttagtttagtggtttttttatttttttttttagagttaatttttttttttagatggttttgtttagttgagtgaatttagttttattttttaggtttttttattaagttttttagattttgattttttttatagattcggtttaggttgtgttgat

SEQ ID NO: 21 - DNA, 10286 bp, Artificial Sequence
  chemically treated genomic DNA (Homo sapiens)
tttaattaaagagtttttattaatgtagaatgattgataattatattattattaatatattgtaagatattaattgaaatttaaatttgacggatatttttttagtttttaaatattatagatatagtttggattttttgttaaaggtggttaatttggttgtttagttttttagaaattttttaaatatatattaatttattttagtttgtatagtaaatttttattgatttggtttttaaatataaaaaaattaaattattaaattgtttttttattttattttgtggaaataaatgaaataaggtgtggtaattaaggaattgttttaaaaataatattttttaggatataatatagggttaatattatgatttttaatattttgtgtgtttagtgtttgaattagtaaagtagtataagtatagtttggttttattttgtagtgtgttttagtttattatgattttatggatgtaatttgtttataatttatgtatgagtatcgtggtaataatagttaatattttttttattttttgagattgagtttcgtttggttttttaggtcgatttaggtttattgtaatttttgtttttcgggtttatgtgatttttttattttagttttttgagtagttgggattataggtatatgttatttattatatttagtattttgggagatcgaggtgggagaattataagtttaggagtttgagattggtcgggataatatagtgagattttatttttaaaaatattttattttttaaaaaattttaaaaataaattaggtgtggtgatgtacgtttgtagttttaattatttgggaggttgaggtgggaggattgtatgagtttaggagtttaaggttgtagtgagttatgtttatgttattgtattttagttttagttttttaaagtggtgggattataggagtgagttattttagttagttatgtagttaatatttttgaggtattaagtaggtattgttttaggggtttagtatattaatttttttaatttttagagcgatattgttgttttttttatttatagatgatagagaggttaagtaatttggttaaggttgtatatttagtaagcggtgaagttgtggatattagtgtttatattttttaggtaattaatgtagttaattatagtggttgttaggtaattataatatttaatgaatataatagtttattttttaagttttttggagggtttttttattttaaatttttttaaattaaatagagatgaggggttttattatgttgtttaagttggttttgaatttttggttttaagtgatttttttatttcggttttttaaagtgttatagaggttatttagtttttggatttgtagaatatatattgattattgtaaggtagagagatatgtaggaaattttttttttattgtgatggtttggatttttgtgatttgtaaaaaaagttatatagtagatttttaaggttttattaggttttcgtttttttatggagaataaatttttcggaagtttttattttttagggtaaaaatttgaatgttttttgggtttatatggttttgtttattttgttggtttttattttatttttagttattttagttttaaattttttttattatagggtttcggataagaattttttgtgattgttgtatttacgttttttgtattgtttagttaaattttgttaattttttaggttttttcggatttattagattaggtttggttcgtttttgattttttatagcgttttgtattgtttttttgtagtatttatgaaaatggtaattgaaaaattgtggattaggggaggtagtttatgtttgtaattttagtattttaaaaggtcgaggtgggtgtattatttgattttagttgttcgaaattagtttgggtaatatggtgaaattttattgttataaaaaatataaaaattagttaagtatggtggcgtatgttttgtagttttagttgtttgggaggttgaggtgggaggattatttgagtttaggaggtttaggttgtagtgagttatgtttgttttattgtattttagtataggtgatagaaagaaaaattgtgtaattattaaacgtttgtttgtttggttgtaagtgtaagttttatgtgggtagtgattgtgtgtttgttttgtttattgttgaatttttaatatttagtttacggtttagtatatagttggtattaaatgtatatttgtaaattgagtagaagaaaaattattagttattagttgaaaagaaaataaatattcgagtgttttgggtattgattagatttgttgggtgtgtaagaaggtttgtttagatatagatataaagaatgttggaatagtttggtagggcggtttgtaaattaaaggataattgaatatatttatgtaagtttttttttttttttttatatatttttttttttttttttttttttttttttatttttatttttttatttttgagatggagttttgttgttatttaggttggagtgtagtggcgtgattttagtttattgttaatatttgtttttcgagtttaagtaatttttttgttttaggttttcgagtggttgggattataggtattcgttattacgtttggttaatttttatatttttagtagagatagggttttattatgttggttagggtggttttaaatttttgattttaggtgattcgtttgtttcggttttttaaagtgttgggattataggcgtgagttattgtgtttggtttttttatatattttttaagtgattaggaaatatttagggtaaaattatgattttgtgagtaataaattataattttattttaatagtattaaaattttgattaaagtaagtttaggtaggatttggttatttatatttttaattttagtaatttgggaggtcgagatagaaagattatttgagtttaggagtttgagattagagtggataatatggtgagattttgtttttataaaatatttttaaaaaattagttaggtgtggtggtgtatgtttgtaattttatttatttgggaggttgaggtgggaggatggtttgagtttaggaagtcgaggttgtagtgagttgtgattaagttgtggtagtgttattgtattttagttggggtaatatagtaagatcgttttaaaaaaaaagaagaaaagaaatttaagttgagaatattgagagttaacgtgaagaaatatatttgttttaatgatatttatttttttaagtgtgtatttgtgagtattattatttgtttttttttttttggagatagggattttattttgtggtttaggttggagtgtagtggtttaattttagtttattgtaattttcgttttttaggtttaagttatttttttattttagattttagagtagttgggattataggtatagcgttattatattcggttaattttttgtatttttggtagagatggggtttttttatgttgtttaggttggtttttaattttcgatttgaagtgattagtttgtttcggtttcgtagagtgttgggattatagatttgagttatcgcgtttagtttattgttatatcgttgtgattttttttaatttttatttattgttttattattttattgatttttcgaaataattttacggggcgagtcggttttatgggcgttgaagaaatatttttttttttaaagttttaattgtttgaacgatacgcgttgttaaagaggaagtaattaaatttattaggcgagttttgtttttcgtttagcgagttgttgttttttggtgttaaaacgttttcggggttaggcgcggtggtttacgtttgtaattttagtattttgggaggtcgaggcgggcggattacgaggttagaagatcgagattatttcggttaaaacggtgaaatttcgtttttattaaaaaaatataaaaaattagtcgggcgtagtggcgggcgtttgtagttttagttatttgggaggttgaggtaggagaatggcgtgaattcgggaggcggagtttgtagtgagtcgagattgcgttattgtattttagtttgggcgatagagcgagatttcgttttaaaaaaaaaaaaaaaaaaaacgttttcgggtttttttggcgagttttaagttatattggatcgttgtttatttttagagattatttcgtatttatgtatttggaaggtatttaaagagaattattttaagaaatttattttattttattttaataataaagtatagtttgtagtatatggattttatttatgtgatattaatgttaattttatgtgtgaaatatttgggtttattcgattttttaaaaattagtaattgagatggggtttcgttatgttgtttaggttggttttttaacgtttgggtttaagttattttttcgtttcggtttttttcggcgttgagattataggcgggagttatcgcgttagtttttattttttttgcggcgataaagttcgttcgtttgcggggcgtttcgttcgtagaaattttgtgagggacgtcgcgggggtttttaagggacgcggcgaaattaaaatagtcgtcggtggtttataaaattattttagaaaatgtttttaaaggtacgtttggtttttataaggtgacggttttttagttttcgattcgaatttgagtcgtttatagtattaggtcgtcgttagttcgggcgagttgtttagggatcgcggacgtcgtagtaagtagttttttgttttcgttatattcgtcgagttagtcgcgcggaatttatttttttatcgtgggttcgtttttcgtcgttagtttgtttacgattggtcgattgggttgttcgtcgcgagagaaggcggtgttttcggtaggtcggcgtttttattggtcgggatggcggcggcggcgcgcgcggtttcggcgagtaggggaagtcggtggtcgcggttgcggaacgggcggaggttgtcggtttcgtaatcgtcgttttttttcgttgattcgcgggttgtgaggtttgggtcggttcgggtcgtatcgcgcggggtcgttcggagtggaggtcgtttgggggtaggcgggttagaggagtaggtaaggaggttgcggcgggcgttttgagaacggggaggaggaggtcgcggcgacgtcggtcgttcgattgggtgcgggttcggttcggggaaatttagtttcggttttagacggttcgttggttcgggaaggttacgcgaggttggaggcgcgggcggcggcgtcgcgcggcgtttgatgtaatttgtcggtaatattcggcggggacgttgagtttatttttggtcgcggtttagcgttgcggcgtcgttcgtcgattttcgcgttgttcggggcgtttttcgcggcgggtcgggagcgcgcgaacggtcggggaatgttttttgcggagttcggttttttttcggtgaaacgggcgttgtgattcgttaggttcgtattggtttttggggatgaagggtgtttttagaatagtagaaggtggatcgagtcgagttttagaattttgattttttagaagggtttagtttgcggtgatcgaaaatttgtttagaagtttaaagattgattaataaaatagggaaagtaattggtttttaaatgtatgattttgtagagataatattttgtttttttgtggagttgttggaatgttttgtattttattgttgaacgtagtttagaagaatacgtaatatttacgggtcgaatagagaagaaatgaagtatttcgtaggtatagttggagggagcggagtagggtcgatagttagcggaggtgattagatgcgaaggatggaaatgtatgtgtcgcggggggaggagagtgttttttagggtagttggtgtgttgtttttttttcgtaggtttacgtgttgggttttttttttgtttgaagtttatattgtaatttggtattttgaaatgtataagatttagaaaggttttaatgttgatgggtgatattaaaattggtagttgtgttagaattgattgtttatatgaataggttgttatttaaggtagattttttttaaagaaatgtgatttttagagaaaattttaaaagaaaattttataagggtttgttttacgaagatattttatatttagaagtttttgatatttaagatgtggttatttgttagtttttgagtagtatttgggataagttgtttataaggtcgattttgtttttggaaaaagttgttgtaaataaggttaaataattatagggtataagggagttgaagtatattttagttttttgatttttgtttttggtgggtatatttggttggtttagttatttttaatatttgtttttaaaaaaagtagatggaaataaaattttattgagaatattttttaaatttttaagattatattatgtttgtttgtaaggttgtttgattttggagagatggttttatttttgggaaattaaatattatgtgttgagtttttggtaaagataaataggatttcgtggggttgaatttggtttcgtggtttaagattgttttatttggttatagtaatggtaaatataggtagttacgattttagttgtattgtgcgtttttgggagggttggttttatgggttgttatattgataggtatattggttttttgcgtttgtggttttttagttttattagtaaaaaaaagataaaaatgagtatgattttttaatggatgtttatttataaatagtttatttgttttgtgtgttgtaaattattttaaaaggattgggttagaaagatgatgttgatgtttttttaatgttttagtgatttatttttgtatttttagaaaggggacgtttttttttttatggattttgcgttagatgtttgtgaagatttgtagggagatacgatgcggttggagttgatagatttagggaataaatttttttagatgtttaaagaaaagagaaagtatagattatttaggatatagatagtggtttagtattgttaagatgtggtgtgagggaggagagagggttaggattttggatttgattttgtagattggagttagagatgaatttttattaggagaatgatttatttaggtttgagtgtttaattgttttggagatagaggttggaggaagtaggttagattagagattagtgtttttgagagatgatagtggtttaaggtgatttcgatgggattgggatggagaggaagagtagatgggaagttttttttttgtttgttttaggtggaattgttaaattttagagattaaatagagttaggattaaggagaaatatttgtgattattttgaaatgttgatttttattgaggaaatcgagtgaaaaatttattttggtgggtaaggggaggaatattgggttttaggtttgtggagaaaagggataaaagggttaggaaaatttttgataggtttatttttttaggtgaaatttgagaaaaatttgattttgttttatttattttaatattttgcgtttttagtgtgattgacgtgaatgaatattatttgaattaagtttgaattaaaataaagtttattatttatttagtttattatttttaatatttattgggaattagtagtagaggtttttagattttagtgtatttagagttatttggaggtttttttatgaaaagattatttagttttgtttttagaatttttgattttaagtttggggtagtttgagaagttatatttttaaagagtttttggatgatgatgatgttggtttagggattatattttgagaattattgttttttagtttttttgttgttttttttttgagtgatttatatggaaggaagttaggcgtcgttttgtattttgtagtttgaattttggaatagtgtttgtttatagaggagttagatttgaatttaggattgagtgtttagtttttaaataaatattttttgtttgttgtaggtgtttagtaaatgtgtgtggaggaataaagcgtaaatgagagtggtttttttagtgtaaaattatttagttttttgatttttttttatttggttaatttttattttaagagttatttatatggttaaagaatttattaaataaaatatttttggagttattttgattatttttaagttttttttttttatatttttattagtttgtaggtttagtgaatattttttttaggttaaagggtttatttttaaaattttatttattatatacgtttagtttagtattttgtaagatgagttaggtagaggtgaaaaagtttttttttgtttttgtatttttggatacggaaataggcgtgaacgttgttgaacgtggattttgtagtgagtaagagttgtttgttagtgattgaaggtcgtggtgtgttgtttgtaggaaagtgttttattattttatattttttatttgtatgtggggaatagatagttatggaagaaaagagatttgtttaaattaaaatagggggagttatagttaagataagaattggtttggttattggtttttatcgttttggattattgttatttttgagtatggataagttgattgtagagagttttaaaggttaaaaatataattggtatattaaaaaaaaagtagagaaataaggtgaatatgattatgattgttaagatagttttaggggaggtgttaaataagtttttaaaaattgagtaaagtattttttatttgatattaaatggataataataatgttaggtggtattaaatgtggtttagattaatattaaatagttatttttttattggaagaaaaatgaggtaatttaatgatgattaagggaaattgtgaattgtttattattgaagataggtttggagtggatcgtttttatggtttggagggatgttttttgttttgttttagtgttggcgtgagaatagatgatttattagtttagagtcggttgtgtggttttgaaaataatggaaagtaatgatatatggattttttaaagtaaagatgttttttaaaaagagattaataaatagtgtatagaattgtttggttgaaggtttgggtgtagttattggtgtttgttaattgagtttttttttattgtgggattattgtataaatttgattttagattttttttattgatgtgattttagtagttttgtgaaaagagaataggatagttttatgtttttaatattgttttttaaatttttaagagtgttttgattttttggtggatatcgtttattgaatttagtttgttttgaagtggttttatgttgataggatagttatatttttatattttttggggtagttgtagggatttaattggatttagagtaatttatatgtgattgtttttcgaaatcgtgtttttatttttgtaggtagtagtatagggatgttttagagttggtgcgtttttcgagtttatacgagtttatttggtagtacgaagtggttataggtacggtagttgtttagtttttttgtttagtttgggttttaggattcgtatttttttggatgtattatgagggtttttgtttttttttttgtggttttaggttgagtgtgttttgagttttattaattatgttaagaagaaaaaatatattttttataagtttggtgggatggggagtaaattgagtgttagagtttttaaatttaagaaattgatttagtaaatttggttaaattgtggaattattatttgaggttattaaaaaaataaagtaaataaagatagggtgcgtaattttagttttttgttttgatttgaattaataatggaaatttttttttttttttattgtaggtgttttttttattatagttagttgtagtttttttttgggagattgttaagtgttgttagtttatatgcgttatttaattagtggaagttttttgttttttttttatttttgataataatcgtagaggggtagtgtttttagggatttaggtgggttgagtttcgtttgatggtgtttttgtgtttatttatttttttaagtgaaatgatttagattttagaaatattggaatagttggtagttgttgtagattttttttagtagaattaattaatgttggtttgatgttaggtacgtataagtttgattttatttgattttgttattttaaatattttaatgtaatttattttttaattagg

SEQ ID NO: 22 - DNA, 10286 bp, Artificial Sequence
  chemically treated genomic DNA (Homo sapiens)
tttagttaaaaaataaattgtattaaaatatttgaaatgataggattaaatgagattaaatttgtacgtatttaatattaggttaatattaattgattttgttgagaaaagtttatagtaattgttaattgttttaatgtttttgaagtttaaattattttatttagaaaggtaagtaagtatagaagtattattaggcgaaatttagtttatttggatttttgagggtattgtttttttgcgattgttattaaaaatgggaggaaaataaaagatttttattaattaggtggcgtatgtgaattaatagtatttgataattttttagggaggagttgtagttgattgtagtaggagagatatttgtaatgaaaggggggaaaagtttttattgttggtttaagttaaaatagaaggttggggttgcgtattttgtttttatttgttttatttttttaatgattttaaatgataattttatagtttaattaaatttattgagttagttttttgaatttaggagttttgatatttaatttgttttttattttattaagtttgtaaaaagtgtgttttttttttttgatataattagtaaaatttaaaatatatttaatttgaaattataaggaaagaaatagaagtttttatgatgtatttaaggaagtgcgggttttgggatttaggttggataaaggagttgagtagttgtcgtgtttgtggttatttcgtgttattaaatgagttcgtgtgagttcggaggacgtattagttttgaagtatttttgtgttgttgtttgtagaaatgaaggtacggtttcgaaaagtagttatatgtggattattttgaatttaattaagtttttatagttgttttaagaagtgtaaaagtgtgattattttattaatatgaggttattttaagataaattaagtttagtgaacggtgtttattaaggaattagggtatttttagaaatttagaaagtagtgttaggaatataaaattattttgttttttttttataaaattgttaaaattatattagtggaaaaaatttggagttagatttatgtagtgattttataatgagggaaagtttagttagtaaatattagtagttatatttaaatttttagttaggtaattttgtatattgtttattggtttttttttaaaaaatatttttgttttgaaaagtttatgtgttattattttttattgtttttaaagttatatagtcgattttgagttagtaggttatttgtttttacgttaatattaaggtaagataaaaagtatttttttaaattatgagggcgatttattttaagtttatttttagtaatggatagtttataattttttttggttattattaggttgttttattttttttttagtagaaaagtggttgtttagtattaatttgagttatatttagtgttatttaatattattattatttatttggtgttaagtgagaggtgttttatttaatttttaagaatttgtttaatattttttttgagattgttttaataattataattatgtttattttatttttttattttttttttaatatattaattatatttttagtttttaaagttttttatagttaatttgtttatgtttagagatagtaatgatttaaagcggtagagattagtgattaggttagtttttgttttggttgtggttttttttattttagtttgggtaaatttttttttttttatggttgtttgttttttatatgtaaatgagggatgtggaatagtaagatatttttttatagataatatattacgatttttagttattaataaatagtttttatttattatagggtttacgtttagtaacgtttacgtttgttttcgtatttaaagatataggaatagggaagggtttttttatttttgtttgatttattttgtaaggtattaggttgaacgtgtgtggtaggtgaggttttaaaggtaagttttttggtttgaaaagagtatttattgaatttataaattggtgaaaatgtaagaaagagaaatttggagataattaaaataattttaagaatgttttgtttagtaagttttttaattatataaatagtttttaaagtgaagattaattaagtaaaaggggattaaagagttaagtgattttatattgaaaaggttatttttatttacgttttgtttttttatatatatttattgaatatttataataggtaaaaagtgtttatttgaaagttggatatttagttttaaatttaagtttggtttttttgtggataaatattattttaaagtttaggttataggatgtagggcggcgtttggtttttttttatgtgaattatttaaggaggaaatagtaggaaagttgaagagtagtggtttttaaagtgtggtttttggattagtattattattatttaggaattttttagaaatgtaattttttaggttgttttagatttagaattaggagttttaagaatagagttgagtaatttttttataaggagatttttaagtaattttgaatatattgaagtttgagggtttttgttgttgatttttaatgaatattgagaatggtggattaagtgggtaataggttttgttttaatttaaatttaatttaagtaatgtttatttacgttagttatattgaaagcgtagaatgttagaatgagtaaaataaaattaaattttttttaagttttatttgggaaaataaatttattaagaatttttttaatttttttgttttttttttttatagatttagaatttaatatttttttttttgtttattaaaataaattttttattcgatttttttaatgaaggttaatattttaaaatagttatagatgtttttttttggttttaattttgtttagtttttgggatttgataattttatttaaaataaataaaaaaaaaattttttatttattttttttttttattttaattttatcgaaattattttaggttattattattttttagggatattggtttttggtttagtttgttttttttaatttttgtttttagagtaattgaatatttaaatttgagtgagttatttttttggtgaaaatttatttttggttttagtttataggattaaatttaaggttttgattttttttttttttttatattatattttgatagtattaaattattatttgtattttaaatggtttgtgtttttttttttttttgggtatttgggaaaatttgttttttaggtttgttaattttagtcgtatcgtgtttttttgtagatttttataagtatttagcgtagggtttatgaggaaggggacgttttttttttgggagtatagaagtgggttattggagtattagaagaatattaatattatttttttaatttaatttttttgaagtgatttataatatataaaataaatagattatttgtaaatgaatatttattaggaggttatgtttatttttgttttttttttattgatagagttagaaagttataaacgtaggaggttagtgtatttattaatataataatttatggaattaatttttttaagaacgtataatatagttggaatcgtggttatttgtatttattattattgtgattaagtgaggtaattttagattacgagattaaatttagttttacgaggttttatttgtttttattaggggtttagtatatagtgtttaattttttagggatgaaattatttttttaagattagatagttttgtagatagatatgatgtgattttgagaatttaaaggatatttttaatgaagttttgtttttatttattttttttaaaagtaggtattaaaaataattgaattagttaagtgtgtttattaaaagtaggaattaagaagttgaaatatgttttagtttttttgtattttgtaattatttagttttgtttatagtaattttttttagaagtagaatcgattttatgaatagtttattttaaatattatttaagggttaatagatgattatattttaaatattaagagtttttaggtgtagaatgttttcgtaaagtaagtttttataggatttttttttaaaattttttttgggagttatatttttttgggagaagtttgttttaagtgataatttatttatataagtagttaattttgatataattattaattttggtgttatttattaatattgagatttttttaaattttatatattttaggatgttagattatagtataaattttaaataagaggaaaatttaatacgtaaatttgcggaagagaagtaatatattagttgttttggaaaatattttttttttttcgcgatatatgtatttttatttttcgtatttggttattttcgttggttgtcggttttgtttcgttttttttaattatgtttgcgaagtgttttattttttttttattcgattcgtaggtgttgcgtgtttttttaaattacgtttaatagtaaagtgtaggatattttaatagttttataaagaagtaaaatattatttttgtaaagttatgtatttaaaaattagttgttttttttattttattgattagtttttgaatttttgaatagattttcgattatcgtaagttgagtttttttagaagattaggattttaaagttcgattcggtttattttttgttattttgggaatattttttatttttaggggttaatgcgagtttggcgggttatagcgttcgttttatcgagagggggtcgggtttcgtagggggtatttttcggtcgttcgcgcgttttcggttcgtcgcgaggggcgtttcgggtagcgcgggggtcgacgggcggcgtcgtagcgttgggtcgcggttaggaatgagtttagcgttttcgtcgggtgttgtcggtaggttgtattagacgtcgcgcggcgtcgtcgttcgcgtttttagtttcgcgtggttttttcgggttagcgggtcgtttggggtcggggttgggttttttcgagtcgggttcgtatttagtcgagcggtcggcgtcgtcgcggttttttttttttcgtttttagggcgttcgtcgtagtttttttatttgtttttttagttcgtttgtttttaggcggtttttatttcgagcggtttcgcgcggtgcggttcgagtcgatttaggttttatagttcgcgagttagcgaggaggagcgacggttacgaaatcggtagttttcgttcgtttcgtagtcgcggttatcggttttttttgttcgtcggggtcgcgcgcgtcgtcgtcgttatttcggttaatgggagcgtcggtttgtcggaggtatcgttttttttcgcgacgggtagtttagtcgattaatcgtgggtaggttggcggcgggaggcgggtttacggtgggggagtgggtttcgcgcggttggttcggcgggtgtggcgggagtagggagttgtttgttgcggcgttcgcggtttttaggtagttcgttcgggttggcggcggtttagtgttgtggacgatttaagttcgagtcggaggttgaaaagtcgttattttgtggaggttagacgtgtttttggaagtattttttgaggtggttttgtgaattatcggcgattgttttggtttcgtcgcgttttttggaagttttcgcggcgttttttatagagtttttgcgaacggaacgtttcgtaggcgggcgggttttgtcgtcgtaaaaagagtggaggttgacgcggtggttttcgtttataattttagcgtcgagggaggtcgaggcgggagaatggtttgagtttaggcgttggagaattagtttggataatatagcgagattttattttagttattaatttttaaaaaatcgaatgaatttagatgttttatatataggattagtattgatgttatatgggtgaaatttatgtgttgtaggttgtgttttgttgttagggtgagatgaagtgaattttttaaaatgattttttttgggtgttttttaggtgtatgggtgcgaggtgatttttgaaaataagtagcgatttagtgtgatttaaaattcgttaggagaattcgaaagcgttttttttttttttttttttgagacggagtttcgttttgtcgtttaggttggagtgtagtggcgtaatttcggtttattgtaagtttcgtttttcgggtttacgttatttttttgttttagttttttaagtagttgggattataggcgttcgttattacgttcggttaattttttgtatttttttagtagagacggggttttatcgttttagtcgggatggtttcgattttttgatttcgtgattcgttcgtttcggttttttaaagtgttgggattataggcgtgagttatcgcgtttggtttcgaaagcgttttaatattaggaagtagtagttcgttgggcggagggtagaattcgtttgataggtttaattgttttttttttagtaacgcgtatcgtttaaataattgaggttttgaaagaggaaatgtttttttagcgtttatggaatcggttcgtttcgtaagattgtttcgaggaattagtaagatgataaagtaataaataaaaattaaaaggggttataacggtgtaataatgggttgggcgcggtggtttaggtttgtaattttagtattttgcgaggtcgaggtaggttgattattttaggtcgggaattagagattagtttgggtaatatggaaaaattttatttttattaaaaatatagaagattagtcgggtgtggtggcgttgtgtttgtggttttagttattttggagtttgagatgggaggatggtttgagtttgagaggcggaggttgtagtgagttgagattgagttattgtattttagtttgagttatagaatgagatttttgtttttaaaaaaaaaaaaataggtaataatgtttatagatgtatatttaggagaataagtgttattgaaataagtgtgtttttttacgttggtttttagtatttttagtttaaatttttttttttttttttttttgagacgattttgttgtgttgttttagttggagtgtaatggtattgttatagtttgattatagtttattgtagtttcgattttttgggtttaagttatttttttattttagttttttaagtaggtgggattataggtatgtattattatatttagttaattttttaaaaatgttttgtagagataaggttttattatattgtttattttggttttaaatttttgggtttaagtgatttttttgtttcggttttttagattgttgggattaagggtgtgagtaattaagttttgtttgaatttgttttgattaagattttagtattattaaaataggattgtgatttattgtttataaaattataattttattttgaatattttttaattatttaaaaaatgtgtaagggggttagatatagtggtttacgtttgtaattttagtattttgggaggtcgaggtaggcggattatttgaggttaggagtttgagattattttggttaatatggtggaattttgtttttattaaaaatataaaaattagttaggcgtggtggcgggtgtttgtaattttagttattcgggagtttgaggtagaagaattgtttgaattcgggaggtaaatgttggtagtgagttgagattacgttattgtattttagtttgggtgatagtaagattttattttaaaaataaaaaaataaaaataaaaaaggaaagaaaagaaaaaagaaaaatgtgtaaggggaaaaaaaagaatttgtataggtatatttagttattttttggtttgtaaatcgttttgttaagttgttttagtattttttgtatttgtgtttgggtaggtttttttatatatttagtaagtttagttagtgtttaggatattcgggtatttattttttttttagttggtagttggtagttttttttttatttagtttataagtatgtatttggtgttaattatgtattaagtcgtaggttaagtgttggagatttagtaatgagtaagataaatatatagttattgtttatatggaatttatatttatagttaggtagataggcgtttggtaattatataatttttttttttgttatttatgttggagtgtagtggggtaagtatggtttattgtagtttggattttttgggtttaggtgatttttttattttagttttttaagtaattgggattataaggtatgcgttattatgtttggttaatttttgtattttttgtagtaatagggttttattatgttgtttaggttggtttcgaatagttgaggttaagtgatgtatttatttcggttttttaaagtgttaggattataggtatgagttattttttttggtttataattttttaattattatttttatagatattataagaaagtagtataagacgttgtgagaaattagaagcgaattagatttagtttgatgggttcggggaagtttgaaaaattgataggatttggttaggtaatatagaggacgtgggtgtagtagttatagggaatttttgttcggggttttgtgatgggagaaatttaaggttaaagtggttgaaagtaaagtggagattaataagataggtagggttatgtgggtttaagaaatatttagatttttattttaagagatagaagttttcgaaagatttgttttttataaggaaacgagagtttggtgaagttttggaggtttattatgtagttttttttataagttatagggatttaagttattatagtaaaagaaaaattttttgtatatttttttgttttatagtaattaatatatattttataaatttaaagattgagtagtttttatagtattttgggaggtcgaggtgagaggattatttgaagttaggagtttaagattagtttgggtaatatagtgagattttttatttttatttaatttaaaaaaatttaaaataaaaaaattttttaaaggatttgggaagtaggttgttgtatttattgaatattgtagttatttgatagttattatgattaattatattagttatttaagagatatgaatattagtgtttatagttttatcgtttgttagatgtgtagttttggttaaattatttaatttttttgttatttgtaaatggagaagataatagtgtcgttttgaggattaaaggaattagtgtgttagatttttaaaatagtgtttgtttggtattttaaaagtattagttatatggttggttagagtggtttatttttgtaattttattattttgggaggttaaagttggagtgtaatggtatgagtatagtttattgtagttttgaatttttgggtttatgtagtttttttattttagttttttaagtagttaggattatagacgtgtattattatatttggtttatttttaaaattttttgagagatgaaatatttttagagatggagttttattatgttgtttcggttagttttaaatttttgggtttatgatttttttatttcggttttttaaagtattgggtgtgatgggtggtatgtgtttatggttttagttatttaggaggttgaggtgggaggattatatgagttcgggaggtagagattgtagtgagtttagatcggtttgggaaattaagcgagatttagttttaaaaaataaaaaaagtattagttattattattacgatgtttatatatgaattataaataaattgtatttatagaattatagtagattaaaatatattgtaaaatgaggttaagttgtgtttatattgttttgttgatttaggtattaaatatataaaatattgaaggttatgatgttgattttatgttgtattttaaaaggtgttatttttagagtagttttttagttattatattttattttatttgtttttataaggtagagtggaggaataatttagtaatttgatttttttgtatttgaaagttagattaatagaagtttattatgtaaattgaaataaattaatgtatatttggaaagtttttgaaaaattaaatagttaagttaattatttttgataggagatttagattgtatttgtaatatttgagagttgggaaaatgttcgttagatttgagttttagttgatgttttgtagtatgttggtgataatatgattattaattattttgtattggtaaaggttttttggttgga

SEQ ID NO: 23 - DNA, 6046 bp, Artificial Sequence
  chemically treated genomic DNA (Homo sapiens)
  unsure (574)
gtgtggttggagtggggagagtaaaggggagggatagtggtaggaggtaaggttagagtataaataaagggtaagattatgtgaggtttgggagataattgaaagacgttgggttttgttttgagagaaatttagagggtgggggtgaaggtgtggtattgggggttttgagagaggagtgatatgatttgatatatttttatagaattatttaaattgttgtgttgagaatagattggtagtgggaggtgggtaagggtggaaatattgagattagtttagtgttagatgatgatatttcggattatggtagttgaagcgtaagttgtgataaattttttatagtttgaaatttttttaaggtggttttgatagaatttttaggtgagaagttgagtagtatggttttagagtttgtatttggataattggaaggatggatttgttaataattgagaatagaaaattgttgattgagtagattttgaggggaagagtatgaatttggtattagatattttaagtttgttataaatattagatatttaatatgggaggaattaaggtatatgtntgttgttaagattggttttttagagtaggagaaaatgataagtaggatagagagtgagaaggagaggattgtatttagtgtatatatggagagtttttagagtggaaaatatatagatgtttataaagttatagtttggaaggcgagtatgtaagtataaatgtatatagtgagtagttagattgataggaattagggtaaagttttttttggaagtttttatttttatagtgaaataaagagtgttttgtttgaaggaattaatgaatttttttttatttttttgtttaaaattttttataggtttttttttatttttgagaataagatttaaatattttattatagtttataaggttttatgggttttggatttggatttgtttatttttttttattgttataaatgttttagttatagggtttttttttttgtgttttagatagatgataaattcgattaagttttggtttttttgatttatttgtttttttgtttggtacgtttttttttttgtttttttaagtttggtttattttttttatataggttttattttaaaggttatttttttaggttttttttgaatattttatttaaaataaattttttttttaatatattattttattatatatttgttatgtattgtttgttgttttttataagaatgtgttttataagaaattagtatttttaatttattttattattttttttttgttttttgattttattaattattatattatgtgtgtgtgtgtgtgtgtgtgtgtgtgtgtgtgtgtgtgtgtgtagagagagagagagagagattgagatttttttgtattatttattttttttaagagaatagtaattttataataataggtattgtgtttattttatttattgttgtgttttttgattttagaatcgtatttggtatataatagttgtttaatgaatattttttgatgaataatttggaaagttagatgaaaaaattggatagagagtatataatagagagtttggtatatagtaaatttttaataaatgttatttgttgtgatgataaaaaaagatagttatagtaacgattataagtataattatgaaaggttgatgatttttttttattcgtgaattaatttttttttgttttattagaaattttgattaattatatttttttttttttttataggttttttgtttttagttgttttatatttgtttataattaaaataaaaataatagttaaaatatattttttttaattttgtatttttttattagatataattaagtatttttatagtttagtaataaaaaagagttgtttatattattttatagttagttaattaaaataaattttgaatgaatagatttatttttttttattgtttttatttataaattagtttttttaaattgaaagaaattatttttatttaatttagtttattatttaatttagtttttattttgtaaggaaattaggtatattttgtgtatttttttaaaaattatgtatgtatatttagatatattttgtgtatataatcgtgtattttgaattttttttaataaatgaaatattttggatagttttttaaagtatatataaaaagttaggttaggtacgatggtttatgtttgtaattttagtattttgggaggttaaggaaggaggattgtttgagtttaggagtttaagatttgtttaggtaatattgtgagattttattttttattttaatttttttattatttcgtttttataaaaaaatttaaaaattatttgggtttgtgatgtgtttgtaatttaagttatttaggaggttaaggtgggaattttatttgggttgaggttaggagttgagtttgtagtgagttgtgtttagtttattgtattttagtttaggtgataaagtaagaatttatgtttatttaaaaaaaaaaaaaaaaaaaaacgagagagagagaagaaagggaaattaagtattatttttgggaaaaaattattgtatttagaatagtttttttttttagttaataaaagtaataaattaggttaggagcggtggtttacgtttttaattttagtatttttggagatcgaggtaagtggattatttgaggttaggattttgagattagttttgttaatatggcgatcgcgttgttttattaaaaatataaaaattatttgggcgtggtggcgggtgtttgtaattttagttattggggaggttgaggtaggagaattatttgaattcgggaggtagaggttgtcgtgagtcgatatcgtattattgtattttagtttgggtgatagaggaaggttttatttttaaaaaaaaataaaataaaataaaaaatagaaaagaaaagaaagaaatggttgaataaattataatgttgttatataattgaatattatgtagttaatataaaaggtagatttatatattgatttgttagtgtaaaaagtaaattttagattaattatagaataattttatttttgaaaatatgaaaatatttggttatttatatagatttattgtatatatttaagaaatataaatttaattaatatagattattttagggaagatgaaatttgatgattgggtaatagaaggaatatttattaggtaatttagataatttttaaggtgaaattatagatgattttttttgttattttttagtatttttttgaaataagagagtaattaaaataaattttgaatgaatagatttatttttttttattgtttttatttataaattagtttttttaaattgaaagaaattatttttatttaatttagtttattatttaatttagtttttattttgtaaggaaattaggtatattttgtgtatttttttaaaaattatgtatgtatatttagatatattttgtgtatataatcgtgtattttgaattttttttaataaatgaaatattttggatagttttttaaagtatatataaaaagttaggttaggtacgatggtttatgtttgtaattttagtattttgggaggttaaggtaaggaggattgtttgagtttaggagtttaagatttgtttaggtaatattgtgagattttattttttattttaatttttttattatttcgtttttataaaaaaatttaaaaattatttgggtttgtgatgtgtttgtaatttaagttatttaggaggttaaggtgggaattttatttgggttgaggttaggagttgagtttgtagtgagttgtgtttagtttattgtattttagtttaggtgataaagtaagaatttatgtttatttaaaaaaaaaaaaaaaaaaaaaagagagagagagaagaaagggaaaataagtattatttttgggaaaaaattattgtatttagaatagtttttttttttagttaataaaagtaataaattaggttaggagcggtggtttacgtttttaattttagtatttttggagatcgaggtaagtggattatttgaggttaggattttgagattagttttgttaatatggcgaagtttcgtttttattaaaaatataaaaattatttgggcgtggtggcgggtattttgtaattttagttattggggaggttgaggtaggagaattatttgaatgtaggaggtggaggttgtaatgagtagagataagtattattgtattttagtttggggtgatagagcgagatttcgtttttaaaaaaaagaagaaaaaaaaagtattaatttattatttaatgagttttttagttttcggtatttattttttttaatttaatttttgaggaagttatagttaatggaaacgagttatagagagagagaaataggagaaaagtttaaatttagattttttaaggcgtataataggtttgttacgtttttggattggatagcgaattttaatttttgttgttgaaagtttattttaaattgttggtgtagtttttttaaaagacggtaattttgtttgggtagtgaaaaatatatgtatttttatttagtttcgtttataggttttaaattttttaaggatggggtggaggatgacgttcgttagtttttggtagataatagtattttggtattttaggattattattttttgtttatttttgggagttttttttttcggttttttttttcgattttttgttgggttttttaaatttttttttttgtttagtagtggttacgtcgttcgttttgcgtttttcgcgttgtttcgtacgtggaatggtttatgacgttacgaggttacggtttaattagatgcggcgtttgggaaattttaaatttaaaggcggggcggtttgtgagttttgaagtgtcggtcgcggagggttttggttatttttttgggattagtttagtttgataggatggcggaggaaggagtcgtggtcgtttgcgtgcgagtgcggtcgttgaatagtaggtaggggggttatattacggttcggtgttcgttgggtttgcggcgtcgttttgagtcggaggggcgaggtttacgatgtttttaggagtcgttgtttttcggttttgttgtttagtgattcggttgttggttatcgttttagggtttgtaaagtgataggggaggatcggagatttagaagatattttttagttgcgagatttatttaaatttaatttagtttcgttgatatatagatttttttttttgtgttgttttgttttgcggtatttgtttttttttgttttatttttcgtttagagaagtcgtatgggatcgtgtttttttggtttttattatagttagttattttatatttaattgttgtttttagattttttgaagataagggttagtttgttttgttatattatatttaatcgttatttaagattattttataaatatttattaatttttttttagtgattttgtataatatagatattttcgttattgtttagtggtttttttattttaatgggacgagatagaaagtaaagttgaaaatgtaggatgttaagtggtgatatgtaggtaataagtgttagggagaaaaagtaggaagaggaataaatgaaatcggtttgttttattagtttttggttttcgattcgaaatgttaatattttgtgtgtgtgagaaatttttattgaatacggggtttaataaatgtaaatattaagattaggaattttttatttttgaggagtttattatttaatgttttaaacggttatataaagaaattattaggatattttttgataagtgttatgatgggtaggtagagaatgtttgttagaggagttattagtttattagagacgaaagtttttcgtggggtgaattggtgttagaaaagttttgacgttttttatgagtgaaataatttttatgttatttaatggaaagggaagttagagtattttaggtatagagaggttatatttgttatttg

SEQ ID NO: 24 - DNA, 6046 bp, Artificial Sequence
  chemically treated genomic DNA (Homo sapiens)
  unsure (5473)
taaatgatagatgtaatttttttgtgtttggaatattttgatttttttttttattaagtaatatagggattattttatttatgaaaagcgttaagatttttttgatattagtttattttacgggaagttttcgtttttgatgggttaataatttttttagtaaatattttttatttgtttattataatatttgttaaaaggtattttaatggtttttttatgtagtcgtttaaggtattagataatgagttttttaaaaataggaaatttttgattttggtatttgtatttattaaatttcgtgtttaataaaaattttttatatatataaagtgttagtatttcgggtcgagggttagaagttagtgaagtaaatcgattttatttatttttttttttgttttttttttttagtatttattatttatatattattatttaatattttatatttttaattttattttttgtttcgttttattagaatggaagagttattgggtaatgacgggagtgtttgtgttgtataaagttattaaaaaaaaattgataaatatttgtagaatgattttgagtgacgattgaatgtaatgtgataagatagattagtttttgtttttagagggtttggagatagtagttaggtgtaaaatgattaattgtgatgagggttaggaaggtacggttttatacgatttttttaggcggggaatggggtagggaggagtagatgtcgtaaggtagagtagtatagaagggaaggtttgtatgttagcgagattgagttaaatttaagtgaatttcgtagttggaaagtattttttagattttcgatttttttttgttattttatagattttgaaacgatggttagtagtcgagttattagatagtagagtcgggaagtagcggtttttggaaatatcgtaggtttcgttttttcggtttagggcggcgtcgtaggtttagcgggtatcgggtcgtggtgtggtttttttatttgttgtttagcggtcgtattcgtacgtagacggttacggttttttttttcgttattttattaggttgaattggttttaggaaaatggttaggatttttcgcggtcggtattttagggtttataggtcgtttcgtttttaaatttaaaattttttaaacgtcgtatttgattgagtcgtggtttcgtgacgttatgggttattttacgtgcggagtagcgcgggggacgtaaggcgggcggcgtgattattgttaaataggagaggggatttaaagggtttagtagagagtcggaggagagggtcgaagggaggggtttttaggagtgggtagagagtggtggttttggaatattagaatattattatttgttaaaagttagcgaacgttattttttattttatttttaaaaagtttggaatttgtagacgaaattaggtagagatatatgtattttttattatttaaatagaattgtcgttttttaaagaaattgtattaatagtttaaaataaatttttaatagtaagagttgaaattcgttgtttagtttagaaacgtgataagtttgttgtgcgttttagaaaatttgagtttaggttttttttttgtttttttttttttgtaattcgtttttattagttgtggtttttttagaggttgaattagggaaaataaatatcgaggattgaaaaatttattgagtaatgggttgatattttttttttttttttttttttggaaacggagtttcgttttgttattttaggttggagtgtagtggtgtttatttttgtttattgtagtttttattttttgtatttaagtgatttttttgttttagtttttttagtagttgggattataaggtgttcgttattacgtttaggtaatttttgtatttttagtagagacggggtttcgttatgttggtaaggttggttttaaagttttgattttaggtgatttatttgtttcggtttttaaaagtgttgggattaaaggcgtgagttatcgtttttggtttggtttgttatttttattaattaagagggaaagttattttaaatatagtgatttttttttaaaaataatgtttattttttttttttttttttttttttttttttttttttttttttttttaaataaatatgagtttttgttttgttatttaggttagagtgtagtaggttgaatatagtttattgtaggtttaatttttggttttagtttaagtggggtttttattttaattttttgagtagtttggattataggtatattataagtttagataatttttaaatttttttgtagagacggggtggtggggggattagggtagggagtggggttttatagtgttgtttaggtaggttttgaatttttaggtttaagtaattttttttgttttggttttttaaagtgttgggattataagtatgagttatcgtgtttggtttagttttttatgtgtattttagaaagttatttaagatgttttatttattaagagaaatttaaggtgtacggttatgtatatagaatatgtttggatatatatatataatttttggaaagatatatagaatatgtttaatttttttgtagagtgaggattgagttagatggtagattgagttagatgaaagtagttttttttaatttaaagaaattagtttatagataagaatagtaaagaaaaatgagtttatttatttaagatttgttttggttatttttttattttagaaaaatgttagaaaataataaaaagaattatttgtaattttattttaaaaattatttaaattgtttagtgaatgttttttttattatttagttattaaattttattttttttaaggtaatttatgttaattaaatttatattttttgaatatatgtaataaatttatgtggataattagatgtttttatatttttaagaataagattattttgtaattgatttaaaatttgttttttatattaataaattaatatatagatttgttttttatattggttgtataatatttaattatatggtagtattatagtttatttaattatttttttttttttttttttgttttttgttttgttttgtttttttttggagatggagtttttttttgttatttaggttggagtgtagtggtgcgatatcggtttacggtaatttttgtttttcgggtttaagtgatttttttgttttagtttttttagtagttgggattataggtattcgttattacgtttaggtaatttttgtatttttagtagagtagcgcggtcgttatgttggtaaggttggttttaaagttttgattttaggtgatttatttgtttcggtttttaaaagtgttgggattaaaggcgtgagttatcgtttttggtttggtttgttatttttattaattaagagggaaagttattttaaatatagtgatttttttttaaaaataatgtttaattttttttttttttttttttttcgtttttttttttttttttttttaaataaatatgagtttttgttttgttatttaggttagagtgtagtaggttgaatatagtttattgtaggtttaatttttggttttagtttaagtggggtttttattttaattttttgagtagtttggattataggtatattataagtttagataatttttaaatttttttgtagagacggggtggtggggggattagggtagggagtggggttttatagtgttgtttaggtaggttttgaatttttaggtttaagtaattttttttttttggttttttaaagtgttgggattataagtatgagttatcgtgtttggtttagttttttatgtgtattttagaaagttatttaagatgttttatttattaagagaaatttaaggtgtacggttatgtatatagaatatgtttggatatatatatataatttttggaaagatatatagaatatgtttaatttttttgtagagtgaggattgagttagatggtagattgagttagatgaaagtagttttttttaatttaaagaaattagtttatagataagaatagtaaagaaaaatgagtttatttatttaagatttgttttggttaattagttgtgaggtagtataaataatttttttttattgttagattgtaaagatatttggttgtatttagtaagaaaatatagagttaaggaaggtatattttaattgttgtttttgttttaattgtgggtaaatatgagatagttgaaggtaaggaatttatgaagaagaagggagatgtgattaattaaaatttttaatgagataagaggagattggtttacgagtaaagagaagttattagttttttatagttgtgtttatgatcgttgttatgattgtttttttttattattatagtaggtgatatttattgaagatttattatatgttaggttttttattatatgttttttatttaatttttttatttgattttttaaattgtttattaagaaatatttattgaataattgttatgtgttagatacggttttaaggttaggaagtataatagtaaatagaatagatatagtatttgttgttgtagagttgttatttttttagaggagatgggtaatatagaaaaattttagtttttttttttttttttttatatatatatatatatatatatatatatatatatatatatatatataatgtaatgattaataggattaggagatagagagagagtgataaggtgggttaagagtgttagttttttatgaaatatatttttgtgggaagtagtagataatatataataaatatatagtaaaataatgtgttgggaggaaggtttattttagatgagatgtttaagaaagatttgaggaggtgatttttgaagtgaaatttatgtgagaagagtgagttagatttgggaggataagagaaagggcgtattagatagaggaataagtaagttaaagaagttaaggtttgatcgagtttgttatttgtttgagatataaaggggagggttttgtgattgaagtatttgtggtaatggagagaggtaggtaggtttaggtttaggatttatggggttttgtgggttgtgataaaatgtttggattttatttttaagggtgaggggaagtttatggagggttttaagtaagggggtaaaaagggatttattaatttttttaaataagatattttttattttattatgaaaatagaagtttttagaaaagattttgttttaatttttgttaatttggttatttattatgtgtatttgtgtttgtatattcgttttttagattgtaattttataaatatttgtgtgttttttattttggaaattttttatgtgtgtattggatatagtttttttttttttattttttgttttgtttgttatttttttttgttttagaaaattagttttaatagtanatatatgttttaattttttttatattgagtgtttaatatttatggtaaatttaaaatgtttaatattaaatttatgtttttttttttaaaatttgtttaattagtagttttttgtttttagttgttggtaagtttatttttttagttatttaggtgtagattttggagttatgttgtttagttttttatttgaaaattttgttagggttattttgagaaaattttagattatgaaaagtttgttataatttacgttttagttattatggttcgaaatattattatttggtattgagttaattttagtgtttttatttttgtttattttttattgttagtttgtttttaatatagtaatttgaatgattttgtgaaaatgtgttagattatgttattttttttttaagatttttagtgttatatttttatttttattttttagattttttttagaataaaatttaacgttttttagttgttttttaagttttatatgattttgttttttgtttgtgttttggttttattttttattattgttttttttttttgttttttttattttagttatat

SEQ ID NO: 25 - DNA, 5979 bp, Artificial Sequence
  chemically treated genomic DNA (Homo sapiens)
ttaagtttttatttttgttgtgggaatggtatttttagaatatgtatattattttgaaaaggaagtataaattagtgaatattaaaggggaaaaattttgttaattatttatattatgagtttgaaggttatatgtgaaatatagaaaagatttaggtttgtttgattatggaattttagattaaaatatgttttttatgtttgtagtaatttataagttattggaaaggaatatgtagagggttttgatatttaaattttatttagttttttgtaggattttgattttattttaatgtaagattgttgattttatgattttgtgtgttttttagagatatttttattgatgatgtataaatgaattttgatttagtaaggttagtttgtaggttttaaagtattttggttattgtggtatattagaatgatagttagtatttattgagatttttttatatgttaggtaataaaaattttataaaagtattttttttatagttataggaggtaggtattatttttattttatagatgaagaattgtggattttgtttttaagaaaatttttaggtttatagaattaagtttaatttttttttattttttagtaaatatagtttttataagaatttgaattttatgaaaataaatggattatttttaaatttttgatgttttagtgaatattttttttttattaataaaatttttatttttggttttggattggttttgtaggagtgtagattgattatagttttttttatgttttaagagttgttagagtttttttttgtagtatttttttttttattttttttttttattatttttaaatatatgattgtaagagtatgataaatatgttgttttttaatttttgttgttgttatataaattaatatattttgagtaattttgaaatgatattaataatgttattagattttttttggattttttgaaaaaaataatggttttagaaggaaatttggataaattttatttttgttttgtgttagaaaaatataaaatttgagttttttaaattaaggtattaagataaataaattgtatttatagatattgaaatatgattgtaatttgataatgtatttttatttttagtgttattgtttattataatagtatttatattattaattttatttagagtttgaattttgtaataatagagattgaaaataaattggtttataattaattttgatagagaatgatgtttttatttttatatttttttatagaagtatatgttttttaattttaaggaatgaataagttagatggaagatttttattgagattaggaatgaattgagtaatttagttttttttttaaagttggggagaaatgagtaaaattaaggagaaatattttgtttttgatatttattattgatgttgtgatattttttttaattaatgttttttaatatgggtggtagtattttagttaattaaatagttaagtaagtagatttttgtattgtatatagtaaatagtattttaattgttgttaaggagataaggaattatttaatgggtaaaaatgtttttatatttatttattttaaatttagttatatttgattgtatttttataaatttagatggagagttggaaaatttatagagaagattagggtttaaattttgtttttttaaattatgtttggttatgatgaatttgaattatttatttaatgataaaattatttgattttttattttttatttttttttttagttaaaattatttaagtaatggatttgtttttttatgagagatatttggtattttggtaatgaaagtgtattattttagttgtatataatttgaaaatagtattttatggtaaatttattaagttaggtagatattttgtatttttgattttttttttttttttttttttttgggggttatattttttttgtatttttagatatgtcgttaaagaaggggttatttatagtggttattttggttttttgaataaaattaatatttgttggattgaaaaattatgttatgatcgattgttttatgtgtgtatgtttttttttttttttaaattttttaagatttttttttataattagttttttttgaagaagtttggaaagttttttgtattgagatttagaatttatagtgtttttgtaatttagttttttaggaattttgaattttaatttttgtttttattttttatgtatatagtataatgatgttagtgttaaatattaaaaatttgattttttattgggatttttttatagatataaatgtatttgtggtagtataaggattttgttattttggcgtgtagttttattaaggagttgtgtgtgtgttttgtatataattttataattttatagttgaaagttgttataaaatgaaagttttgtgtatggtaggatatttttaaggtgggtggatgttttttgtttaaaagattaagatgttaatagcgttttttttttttaatttttttattaagtatttagttagtttgaagagttttaaatggattttattattgagaaattaagatggtagtttattatggggaattgaggaaaaatggattaatataagagttttgtgataatatataattaagatagggtttttttaatatggattttatgtagtgaatgaagatataggttttttatttaatataaatggatagtggatttgattttttaaagattttttttgtggatattttgatatttggagaagaaagatggtatattaatttagataatagtttttatgtttggaattttttgtagtttgatttgtatgcgtatgattttttgaaatgttaatttttaataaaatttgtaatatttaaaaattttttagtttgggtttttttttttaagtggaagtttaattaaatgtttagttttattttagtaatattttggtttttgtagttgtcgagtggtaaagtgtattgaatatgaataaagttggtaaattggaaatggtgtaatcgaaaatattttatttggtttatgaagatttacgttttttataaagttgtgtttttagatggttatttggtttaaatattgttttgtttgtgtttttatgaaatattttttaaaataatttaatgggtaataatagaatttgattttaatttgttataagattttaatgaatttgaaataaattgtttgttgttcgaaaatttaggatgagtgatatatatatatttttgaattattttgtgttgattgaaatggttttttaagttttttaatattataaatatattttgttatagaatatttatttgaatatttaaattaatgttttttattgttttattattagaggaagaagtgttggatttatgggttagggtttttggagtatttataattttttaaatttgaaattatgtgtgtaatttattttatataattttgaagtaggattaatattttgtatcgtttttattttgtataattggggatttagaataaatgaattgtattttgttatagattatttacgtttgatttttaaatgttaggtttttatttattattaattaattgatattagttttggtaattattataaaggtggtaggtattattttggtagataaaatgagtttttgattttgtttttttattttatatgagaagaataaatagtttaggttaaattgttttgtgttaattatattgtttgtgatttatgttaaatattgtagtatatatatttatggttaatatacgagtattatttgttattgattgatgtgaggtggttggtttttgttaaatttaaaaatggaattttggatattgtttttgttacgaaatttatttttgtgtgtagagtatggaattgaaatagtttggattatggattttatttagattggatattgttgattttgtttggtgtaaatttaaagtggatttttttagtgagggagagatatggttttggtagattatgttgaataaggaaagttgattggatttttttgggtgtgtgaatatgtttgtttgaatggagtgtttggtaggatattgtttttggaattagtaatttgtttttgtggattttatggttttgatatttaggagaatttgttttgtgatattattttgataatttgtaattacgtatgttttattgttaataatattgttgaaatgggtgtatatttatttgatttgaaatataagggaagtgttgggatatgtgttttttgttggatttggacgtggagttttttgggttattgatttaaaggtgatcgtgtttggattatatttttgaatttttgtttgaattagtatgggaagtaaatatattgtgattatgagaagtttttttggggggaggagtgtaatatttttaaggttatataatgggttaaagaattttgtgaaagaataaagaaaaatggatatttttgaataaaaattggttgtattaatttttgttttagtgtaatttgaatattagggaggcgtttttgagttgtaaaagttattttttttttttagtggagatggaaaatttttttttaaattttgtttttagattatttttaggtattataaagaaggaaaaatttgaatttatattatgaaattaaggttttatttttatttagtaattattttatttattgggggattaatttttaaaaagattagtatttagttgagttttagattttttaagaattattttttttttaaaatggtttgataaaatattattttttgtttagggaggaagttattttagtttaaggattgaaatatttagtagatttttagataaaaggaataaattatatttttttttggtttaaaaagggtgtttgagttagagggggttaagaagtttttttttttttttttgttggggtggtttggaggggtagggaggtgtgggggtgggggtttttaggttttttgggatggaggatttgttttttttttttttttttttttttttttttttggtggagatgaaggggtgggtttatggtatattatttgagttgtggggtaaatgtagagagtgttaattaaaggtagagtttttagagttgggaaggaggttttagatggcggttgtgttttagagagagcgcgttttgttttttgtttttgttttattttacgtaattttttttaattttcgggtagttttagggggttttcgtagttttttgttttttttagggatttattggggtcgattcgaatttttttttgggagaaaagtagtttttaggagtttttttttcgtgttttgttggaaagaagtagtcgtattgagagtttaggtcgttgttttttttagtttagaagttatggcgtatttttatttttgtgcgtttttttaatgaggttttttttttttcggatttgttttagtattaattattgttttatttttttgattagttaatatatttgagggttattttatttatttttcgttttttaacggaggattttgtttttatttttaattatttgggatttgatatttttttattagtagataggatttttggtttggatatattatatggattaggtaagtttacgattattggtgataattttaaagatttatttgtttaagtttgttttgttttttgtaaatacgagaaatttttggatgacgtaataagatatagagattgttatttgtatttagtgtgttattttgagaaagtttttttattgatagtgatgtttttattgttcggtttattttgttgtttttttttttaaggaaaaaatagaaatatttagttttttggtgtttatcgttgttgtgttataataatatcgttaatatcgttaggattttgtttttgataataaaaagtatcgatagaagtcgggattttattttttttttaatttttgatagt

SEQ ID NO: 26 - DNA, 5979 bp, Artificial Sequence
  chemically treated genomic DNA (Homo sapiens)
attgttaaaagttgaaagaaaggtaaggtttcggtttttatcgatgttttttattattaggaataaagttttgacgatgttaacgatattgttataatataataacggtaagtattaaaaaattaaatatttttattttttttttaaaagaaaaaataataggataaatcgaatagtggaagtattattattaataaggaaatttttttaaagtagtatattagatataaataataatttttgtattttattgcgttatttaagaatttttcgtatttatagaaaataaggtaaatttaaataaataaatttttaaaattattattaatgatcgtgaatttatttgatttatgtagtatgtttaaattaagagttttatttattagtagaaaaatattagattttaaataattaaaaataaaggtaaaatttttcgttaaaaaacgaaaaataaataaaataatttttaaatatgttaattggttaaaaaaataaagtaataattaatattaaaataggttcgaaagaaaaaaaattttattaggagagcgtataaaaatggaggtgcgttatggtttttaagttggaaaaaataacgatttgggtttttagtacggttgtttttttttaataaggtacgaaaagaaagtttttaaaagttgttttttttttaaaaaaaggttcgaatcgattttagtaagtttttaggaaaggtagggggttacgggggttttttgaggttgttcgaaagttagggaaagttgcgtaaagtgaggtaaaggtagggagtagagcgcgttttttttaaggtatagtcgttatttagagttttttttttagttttgagagttttgtttttgattgatattttttatatttattttataatttaggtgatgtattatagatttatttttttatttttattaaaaaaaaaaaaaggagagagagagagagagatagattttttattttagggagtttaaggatttttatttttatatttttttgtttttttagattattttaatagggggaggggggagggttttttaattttttttggtttaagtattttttttaagttagagagaaatgtaatttgttttttttgtttaaagatttgttaaatattttagtttttgagttaaaataattttttttttggataggaagtggtgttttattaagttattttgaaaaagggataatttttagagaatttaaagtttagttaagtattaatttttttaaaaattaattttttaatgggtgaaatgattgttaaataaaagtaaaattttaattttataatataaatttaagtttttttttttttatgatgtttaaaaataatttaaagataaaatttaagggggaattttttatttttattggaagaaaggggtaatttttataatttaagagcgtttttttagtgtttaagttgtattggagtaaaagttaatgtaattaatttttatttaagaatatttatttttttttgtttttttataaaattttttaatttattatataattttgaaaatattatatttttttttttaaagaaattttttataattataatatatttattttttatattgatttaggtaaaaatttaagagtatggtttaaatacgattatttttaaattagtaatttaagaaattttacgtttaaatttaatagaaaatatatattttaatattttttttatattttaaattaagtaagtatatatttattttaataatgttattaataataggatatacgtgattgtaaattattaaagtaatgttataaagtaaatttttttaaatattaaaattatgagatttatagaaataaattattaattttagaaataatattttattaagtattttatttagataagtatatttatatatttaaaaaaatttaattaattttttttatttaatataatttgttagaattatgttttttttttattgaagaaatttattttagatttatattaaataaaattaataatgtttaatttaggtaaaatttataatttaaattgttttaattttatattttatatataaagataaatttcgtagtaagaataatatttaaaattttatttttgaatttaataaagattaattattttatattagttaataataaatggtgttcgtgtattaattatggatgtgtatgttgtagtatttgatatgaattataaatagtatgattaatataaaataatttaatttgaattatttattttttttatgtaaaatgggaaaatagaattaagaatttattttgtttattaaaataatgtttattatttttgtaatagttattaaaattggtattagttgattagtaataaatgaaaatttggtatttaaaaattaaacgtaagtaatttatggtagggtgtaatttatttattttaaatttttaattgtataaaataaagacgatataagatattaattttattttaaagttatataaaatggattatatatataattttaaatttaaaaaattgtgaatattttaaggattttaatttataaatttaatatttttttttttaatagtaagataataggagatattaatttaaatatttagatgaatattttatagtaagatgtatttatagtattaaaaagtttaagaaattattttaattaatataaaataatttagaagtatatgtgtattatttattttgaattttcgagtaataagtagtttgttttaagtttattaaaattttgtggtagattaaaattagattttattattatttattgagttgttttgaaaggtgttttatgaaagtataaataaaatagtatttaaattaaatgattatttaagagtataattttgtgaaaaacgtaaatttttataaattaagtaaaatgttttcgattatattatttttaatttattagttttatttatatttagtatattttattattcggtaattataaaggttaaagtattattaaaataaaattaaatatttaattaaatttttatttaaaaaaaaaaatttaaattgagaaatttttaagtgttataaattttattaaaaattaatattttaagaggttatacgtatataaattaaattgtaaaaaattttaggtataaaaattattatttgggttagtgtgttattttttttttttaaatgttaaaatgtttataaaaaaagtttttagaaagttaaatttattgtttatttgtgttgggtaagaaatttatgtttttatttattgtatggaatttatgttaaaagaattttgttttggttgtatattattataggatttttgtattaatttatttttttttaattttttatagtagattgttattttgattttttagtggtagggtttatttgaaattttttaagttgattgggtgtttgatgaaaaaattaaaagaaaaaaacgttgttggtattttaattttttaaatagaaaatatttatttattttgaagatattttattatatataaaatttttattttgtaatagtttttaattatgaaattgtaaagttgtatgtaaaatatatatataattttttgataagattgtacgttaaagtaataaagtttttgtattattatagatatatttgtatttataaaaaagttttagtgaagagttagatttttaatatttaatattaatattattatattgtgtatataaaaagtaaaaataaaaattaaaatttaaaatttttggaaagttaaattatagaaatattgtggattttaaattttaatgtagaaaattttttaagtttttttaaagaaaattaattatagaaaagaattttaagggatttgaaaaaaaaaaaaaatatatatatataaagtagtcgattatagtatagttttttaatttaatagatgttggttttgtttaaaaaattaaaatggttattataggtggttttttttttaacgatatatttgagaatatagaaaagatgtagtttttaaaaaaaaaaaaaaaaaaaaaagattaaaaatgtaaagtatttgtttggtttgatagatttgttataaaatgttgtttttaaattatatgtaattaaaataatatatttttattattaaaatattaaatgttttttatagaaaaataaatttattatttaaataattttaattgaagggagaagtgagaagtgagaagttagatgattttattattaaataaatgatttagatttattatgattaaatataatttgaaaaaataagatttaaattttggttttttttataaattttttagttttttatttgaatttgtggagatatagttaagtgtgattgaatttgaggtaaataaatataagggtatttttgtttattaggtaattttttgtttttttggtaataattaggatattgtttattatatataatataaaaatttatttatttaattatttggttaattgagatattgttatttatattaaaaaatattgattaaagggagtgttatagtattagtaataaatattaaaagtaagatatttttttttgattttgtttatttttttttagttttaaaaagaaaattaaattatttaatttatttttgattttagtaaaaattttttatttgatttgtttattttttaaaattaagggatatgtatttttatagagaagtataaaagtaaaaatattattttttgttagagttaattataaattaatttatttttaatttttattgttataagatttaagttttaaatgaagttggtgatgtaaatattattatgatgaataatgatattgagaatgaaaatgtattattaaattatagttatattttaatatttatagatgtaatttatttattttagtattttaatttaaaaaatttaagttttatatttttttgatataggatagagataaaatttatttagatttttttttaaaattattattttttttaaaaaatttaaagaaaatttaatgatattattaatattattttaaaattatttaaaatatattagtttatgtgataatagtagagattagaaaatagtatatttattatatttttatagttatatatttaaagatagtaaaaaaaaaaagtaaagaaaaaaatgttataagagaaaattttgataatttttaggatatgaaaaaagttatgattaatttgtatttttgtaaagttaatttaaagttaaaagtgagaattttgttaataaggaaaaagtgtttattgaggtattagagatttaggagtaatttatttatttttatagaatttaaatttttataaaaattgtatttgttaaaaaataaaaagaaattaggtttagttttgtgagtttggaaatttttttagaaataaaatttatagttttttatttgtaaaataaaaatagtatttattttttgtggttgtagaaagaatatttttataggatttttattatttgatatatagaaagattttagtaaatattagttattattttgatgtattataataattaaagtattttgagatttataaattgattttattgaattaaagtttatttatatattattagtaagagtatttttgaagaatatataggattatggggttagtagttttgtattaaaataaaattaagattttatagaaaattgggtagggtttagatattaaaattttttatatgtttttttttagtaatttgtgaattattgtagatatggaagatatgttttgatttagaattttataattagataaatttagattttttttgtattttatatataatttttaagtttataatataaatggttaataaaattttttttttttgatatttattagtttatattttttttttaaaataatgtgtatgttttaagagtattatttttatagtaaaggtaaaaatttaa

SEQ ID NO: 27 - DNA, 11260 bp, Artificial Sequence
  chemically treated genomic DNA (Homo sapiens)
tgattttattagaattatatatttaggtgaaatttttaagtgttgaagataaagttttatgttgtatttaatttggataaagtgtcgggggtattttattaagtttttgttagtaggagatagagagaaagttgttattttaaatttggaaattatgttgagtttttgtaggatgtgaaatgaagaatttagtttatggtgggataggaggagggaaaaaaattagggtgagttttattgatttaagtaattgatagatattatttatgaatggttaaatggttattagttttggtttttgattttatgtagttatggtaggaaggttattttataaattttgaagttgatattttaaggatatttgtgtgtgtgtgtgtgtatatatatatatatatatatatatatatatatatatatatatatatatatatagtttttttttttttttttttttattttttttttttgagatagggttttgttttattttttaggttggagtgtattggtaagagtatagtttattgtagttttaaaattttaggtttaagggatttttttgttttagttttttgagtagttaggattatacgtatatattattatgtttggttaatttttaagttgtttttttttttttttgtatagagatagaattttatgttttttagggtggttttgaatttttggtttttgatttttttgtttcggtattttaaagtgttattattataggtgtgagttattgtattttgggtaggatttattattttttaaatagtttaaggtatttttttaaaaatagttttttaaggtataattgatttataataaattatatatatttaaagtatatagtttgatacgttttgatttatatgtatatatttataaaattattattataattaagatgataaatttgttatttttaaaagtttttttatgtttttttgtaattttttttttttattttttttatttttgttttttagtaattagtgatttgttttttgtcgttgtggtttttattttttagaattttatataaatggaattatataatataatttttttgattgtttgtttttatttggtataattattttgagatttatttattgttgtagtgttagtagtttttaagaaaatttttttattcgtttaagaatgttattgttattttgaattaagttattagtaaaagaagagtaaatttaagatgtagtttgatttgggatttttaatttttggtattttcgtttagttgattttttttttaaatttataaggtattgtaaatattttagaatgaggatatttttttttatgtgtatttgtgtagtgattgttttatagttatttttatgaaattaaagattatttgttatttaaatttatttttgattttttgatgtattttgttattttttttttaaagaaggagttatattattttgttttttatatatattggtatggtattttaattttagtttaattttttgggtattttgttttaatttttattttattttatgtttatgagtgagtatattttagtaatttatttaagatgtttttattagtattgaagaattggaatggaagtatttataatttgttgagaagtgggaaagttatgttttagattttttataatatttgaattttaggttatttaaatttattggtttgtttttttaataaaaattatttgtttatattttttttgattaaaggagtggtggtatttaatgtaatttatttttttttttttttttttttttttttttttttgagatggagttttattttgttgtagtatagtggtacgattttagtttattgtaatttcggtttttcgggtttaagtaatttttttgttttagtttttcgagtagttgggatttataggtatgaattattatattcgattaatttttgtattgttagtagagacggggttttattatgttggttaggttggttttgaatttttgattttaggtgatttgttcgtttcggttttttaaagtgttggtattataggcgtgagttattgcgtttggttatttatttttttaaaattttggagcgtagaggttggtagtttttttaagatgtagagttattatttttatgtgaagtaaatatggatttatttattttataaattatagtttttttaattttttaaaatgtatttaattgatataattttttttaataatttaataattattttgtgtttgttgttagtaagtaagatattgtgtagatataacgatgaatagagatagttttataattttaataatagtagaaataatagaattgtagttgttattttatttagtatttatgtgtcgagtattgtgttatatattttatatatattattttaaaatgtttataataattgtgaggtaggtgatattatttttgtattatagttggtgaaattgaagtgtaaagttgtttagaattttgtataatattgtataatttacgagtgataaaattaggttttggagttagttttgatttaaaagtttatatttttttggttgtgttatgtttttttaagaagtagtaggtagtagaatggggtgggagaagtatatagattatataatagatgatattatagaatataatgtggttgttgtaagtaaagtataaataatatagtttgtggaagaaatttttaatttggattatggggaaggtattataaaggaagtgttatttgaagtgggttttgatagtgtaatattaaaggaggtaaatatttatttgggagggtatattttagggagagttaaaataatatgtaaattgagggtgatttttagaggatggtaggtagtttgatattgttaaatgggttatggtgtattggaagtagtatttagaaggttagattagatataaatgatagttaaatttgtattttttaaagtatatttaaaaggttgagtttgtaggatttattaagtggataattagatttgtatttatggtatttagtgatagttttgatttttaatttgaggttgtaagaaaaggagttttgagttggatgtttgattagttaatgtaagttttattattattttggaaattttatgaaggtaggtatttattttgatttgttagtatatttttagtatttagtaagaagtatttatgttaagtataaaatggaaatttaagagtaaggaagataaagaaatgttagaagaagagttaagagaaattaaagaagtcgatttttaaaaaattttatttagaatttttttggtgttttttatgatagttgatttttttattagtatagattgtagttatttgttagagagtaatgtgatatattaataattgtttatgtgtagttattgatttttttaataatttatagtttagtaaaattttttttttaggtttttgttatgagtatatttgtaatattgtaataaaaaggagataagtttggatttataggttttagatttagttagattaataaagagatagtatttaagttttttagaattgttatcgtttttgttttagggtgtttgaattgttaatatttataatttttttagttaggtattagaaaatggtaataagggaatggagtttttatttgttggttaagaaatgggttgttgtgtaggtaagaaatttgttttgtagaggagggggatagtatagtggagagtagaaaagattaaggagaagggtattaagggttaattttttttgaaagtttttttagagttattagattgatttttttattatttttttatttttataatattttaatttttatttttattaaattaattgaaaattgtatttttatattttttttttttttagattgaaagttttttaaatgtaaggagagttttttttatttttgtgtttgtgtatagttgatgtttaaatattttttgtattaaattgagttaggcgttgttgtaggtgttaatttaaagataagttttttgtttttatggagtttatattttatttgtaatgatagaagtatggttattatagatttttttggatttttttagtgttttttttttttttttcgtagatagtatggtaaagttgaatgtgagtgaagaaatggaatttttttagataaaaattttgtatgggataagggaagaaattttttttttttttattttttatattagatttatttttattttaggattttgaattttggttagttatatatttttttataagaattattaaatttttttgagtatgatatttttgaaattttatttatgaataaaattatgaaaaatgtaatttttttttatgtattattagtttatttggataattatatagttatttttatttattattggatgaggttttagtgattataaggtgaagttattggtggagttttaaaaatgggttattaatttgagtagttttagtatattgtatttgtttttaagttgatataattggagttgtttatatagattaattatattgtgggataaataaattttgatgaattaggttgagaagttgaatattagtaagtatattttttaaaattaaaagttttttgaagagaaatatggaattattaggttgtattatttttattagtgtttaaagtaaggatttttttatttttttaatggttgttttttaattatagttttaagggttgaattaaatgttttttttatttttaatttttttggtggagttagatatgttaatatttatgtttaggatatttgtgtaggtgtgttgatattttaagagtagtattttattataaaaattgttaatagtgattagttttggggtgatagtagtgttatagagagtaatttgagtattttattttttattgttttaagaagtgttttagaattatttttaatagtgtgaaattattttgttttttagtatttttgttatgagaaaaagaatgtgataagttatttaatttatgaaatttaagttatatgtgaattttgttaggtatgtgtgtaatatttggtatttttagttattttttatattttgggttgtaaaaatttttatagtttgtttttattaggtaagtatttgtggtgtttttttttatataaaataagttatttatttagtatgtagtttagttgatatttttattttgtttttaaataattaaattaaaagtatttaagtatatttagttatgatagatataaatatgttttaaggttttgattttttttaaaatgagttttattagttttatgggatgttttgtgaaaaagtatttaaatagtaaatagttttggtaaaaatgttatattttgggtgtttttttagttattttatattagtatattaaagattgtgaagagttttgttaaaaaaaaaaaaaaaaaataaagaaagaaagaaaagtatattttagtatttttcggatttgtttggttatatttttttttttttagtgtttattgatattttcgttgaaatgttttggggagtattgttattgaagggttaataagttattatttgaaaaagaaatagtgttatagaattattagttgagttaaatatatttgttatatagaatttttagaaagaaaataagttgatggatgggataattaattgagaatttttaaatcgaaatttaaaagtaggaaagtaattttgatttagagatgtttttttgtatttgttttgtttaaattaggatttaaaaaggtttttaatttggttgtatgtttattaaattttttttaatggaaaatagtaattttttttttttgtttttttttttatttttatgatatttatttgttgaggagattaggttatttgttttaatttatagtgatttattttagtgttttttgattttacgatggtgggaaagtaatatagttagtatattgtttaatttatggtggggttatgttttaataaatttatcgtaaattgaaaatatttgtattggatttggatgattgttttttggtggtgttgtttaatttttttttttgttttttgaatttttttgtagttggagttagggaggtttgattagatttattttcgatttttgatattttttgtttttatttttaataatttttggtgttaatttaagattaatttgtgaatttagatgttgttagtttggtttaattattatgaagtttttattaattttttttttaatggttttaaaaattagatattgatgatagttgtttagatttattattttattagggattaaagtggtggtatttttttttttttatttgttttttttttttttttttttttatgtttggttaattttttgtatttttagtagaggtggggtttcgaaagtgttagttaggatggttttttttttttttttttttttttttttaaagagatggggttttattttgttatttaggttggattgtagtggtataattataggttattgtagtttggattttttgggtttaagagatttttttgttttagtttttagagtagttgggattataggtgtatattattatgacgttattacgatattattataagtggttgttttaaattatttgtagagatggggttacgtcgttttttttaggttagttttgaatttttgggtttaagttatttttttattttagttttttaaagtgttgggattatagttatgagttattgtatttagttaaagtggtaattttttaattattttatttttttgtatttgttgaaattttataaaagattttttttttattaattttttggttattggaaatatattttatgtataaaaggtagattaaatatattgatttttttttttttttttttttttttttttttttaaattagtttttagatgagtgtatttttttagttgttgggttgtatgatttgtttgttaagtttttattggtttgttgtatgttaggttttttttttaattttttattttatttttatttagagttttgtgaaaattagtcgttttttttagatatatagttgttttttaatatttgtgggtgattggatttaggattttttgaagatattaaaatttgaggatgttttagttatttatataaaatcgtgtaatatttgtgtattatttatgtatattttttcgtatattttaaattatttttagattatttttaatatttattataatgtatatgttgtgtgaatagttgttatattatattgtttaggtaataatgataagaaaaaaagtttgtatatgtttagtatagatgtagtttttttttatatatttttgatttaagattgattgaatttatggatgtaaaatttatagatatagagggttgattgtatatatttttttatttttaattattttttatagtttgtgttttttttaaagtttttgtaaggttttttggaatatattgtttttggatgtagttatttgtataatttttgttttttttttagtattaggttaaataattgtttgttttttttttgttttttattgaggtataatttaaatagaataaaatgtattatgtagagtaaaatttgttttattaatttttttttttatggattttttgtgttttgtttaatttttgtttattttaaaattatgaagatttttttttattttttttttagaaatttatgttttgttttttatttttaggtttatgatttattgtgatttaatttttagtataatgtgagatagaatttatggggtattttttaaagttatgaatttttaattgatataatattaaggttacgaaaagttttgtgaaatgaagtttatatatttaatattttttaaatttatttggttaaaaattttttttttatgatagttattatgttttgggaaatattgatttaaagtattgataaattattgttgttaagggaatattatataattattattagttgagttaagtatttttgttatataaaatttttagaattaattattgaaaagattattttttttttatttaattgtagttgagtatttgtataaattaggtagttttatgtgtggttttatttttgtatttttttttttttatttttttgtatgtttattattggattgatattatagtgttttaattattgtaattttataatgggttatgatatttggtaataaaagttttttagtttaattataattttttatgattgttttgtttatttattgttttttgtattttgttatagattttttagtttttatatatatataaaagtattgggatttattttatttatttattttttttttttttgagatagagttttattttgttgtttaggttggagtgtagtggtatagttttagtttattgtaatttttatttttttaggtttaagtgatttttatgttttagttttttttaagtagttgggattataggtgtgtgttattatgtttagtttattttttaatttttagtagagatagggttttattatgttggttaggtttgtttcgaatttttgattttaagtgatttatttgttttagttttttagagtgttgggattgtaggtatgagttattatatttggttgaagaataaaattgatataataattttggtttgtatttatttaaagatattgaatttattatttaaaattatttagaagagaaatttttaggtttagatagttttattggtgaatttttttaatatttaaggaagaattagtatttattttatgtagatttttttagagaatggaaaagaattaatatgatttaatttttataaagttattgaatttagatatttggtaaggttattttttatgatatagattgtaaatattttaaaatacgagtaaaagggaggatttatttaagaaattttggtttgtttgtttaatatttagtgtgatatattatattaaaataataagagaaaaaaatagtatttgaatagatgtagaaaaagtatttgataaagtttaatgtttatttattattaaaattcgtaggaaattagaaattggaggaagtttttttaatttgataaagagtattcgaaaaaaatttgtagtatttgttttttttttgagatttacgtgtatttttaagattagtatttgtatagtgtaataaagttaagtataataaaatgagatatgtttgtattaggaatttttataatgtgagagcggtttgtgaagttaaaaatatttttataataatattaaaatatttatttttttaaaatttttattattttataaggatttgatgttattttttagaggatatatgatgatattataataggttgaatattagaagtatataggagaatttagttgtgttatattttgttaagttagatgttaaggatttgtaaaaagtgggaaataatgttttttttattaaattttttgttttgaaaatatattgttttaaaaaatatgtgttaatatgtagtgagtttattgttatttttaaattataaattaatatttttagaattttttagttttaatttttgatgtggttagtattgatagtatataaataaaaacgttttttgggagtttaaatttttaagagtgtagaggattttgtttgagaattgcggtgttatattgtttttatttattatttagtaagttttattagtggttagttatagttaattttgttagaatattttgtttttatttaaaaatttatatattagtattttttagtttgtaaatatttaagaagtattagaaggataatatgttatttagataaatcgtagatattatgaggaggtgttttaaatttagttataaaatagtttataatgtttatagattgtgtaggttaaaaatttgtatagggtataagaaaatggtttgtttttgttttttgtttttgtttagtattggtattagtagtaggtatttgttattaataaattgtgatttttagtgtttgttttagttttaattttttagggtattgttttttgattttatttttttgatggatgtaagaagagttgatgatttttcgtttgtttaatttatttttttttatgaggataggaatgatgatttttaagttttttatgtgttggattagaaattagaagtttagattagtgtttttttaagtgttatttttgtatttattagtgtaatattaagttgtttataggttatttgataattatagtaataaatattttggataaagtaataaaatttttgttaatatattttataaattttgtatatgagattaataatggtgattttttggaaattatttgtatttttagtgattattgcgtatatgttttaaatatgaagtagtgattattgtgaattagtatgggttttttaaaaatgagatatattaaatttttggtaaaagttttgatatattataaggaaatagtataaaatattgataagatttttaaatttggatttagaagattaatttatgatttttagtatattattaataaaaagttggaaattaaggatttagaaagagattagagttagagatatagattttgttatgttaatattattttattttttttattgggaggagagattttttgaggttgggatttattttttttttatttttgaatttttttgagttttttatagtgtttttaatataggaaaaggtgtaaatttaagaagggatttaagagtttgtttttagatatgttgatgttttggtagtatatttaggtagaaatgtttaagttaatagatataaatattttattagaatataggattggagatggagattttgttatattatttttataatagtatagtaggatttttggaagattgtatagtatttgtttatttaatttttttgaataaatgaaatgtgtttattttattataagtatttttatattgttgagtaggaaaaagtttgtttgatagagtagtgtttttaattttttttttatagtgtaaaatttgtatgttatatgtattttatttatttttataataagaaagatagaattaaaatgttagaaaagtgttttattttgtattaaaatagaaaagttaataagtttaatgaaaaattttgagatttatattttaaattattttttattttaaaatatgtattttaaagtgttttttgtttgattatagg

SEQ ID NO: 28 - DNA, 11260 bp, Artificial Sequence
  chemically treated genomic DNA (Homo sapiens)
tttataattaaatagaagatattttagagtatatattttaaaataaagaataatttaaaatataaattttaagattttttattaagtttattaatttttttattttaatataaaataaaatatttttttgatattttaattttattttttttattatgagagtagataaaatatatgtaatatgtagattttgtattataggaaaaaggttaggaatattgttttgttaggtaaatttttttttgtttaatagtgtaaaagtatttatggtgaaatgaatatattttatttatttaagaaaattaaatgagtaaatattatgtagttttttaaggattttattgtattgttatgaaaataatgtggtaaaatttttatttttagttttatattttagtggaatatttgtatttattggtttaaatatttttatttaaatatgttattaaaatattaatatgtttaaaaataaatttttaaatttttttttaaatttatatttttttttatattggaagtattatagaagatttagagaaatttaaaaataaaagagaaatggattttagttttagggaatttttttttttagtaaaggagataaggtagtattaatataataaaatttgtatttttaattttgatttttttttaaatttttaatttttaattttttgttagtggtatattgaggattataagttaattttttgagtttaagtttaaaagttttgttaatattttatgttgtttttttgtaatgtattaaaatttttgttaaagatttgatatattttatttttaggaaatttatgttggtttatagtagttattgttttatgtttaaagtatgtacgtaatgattattgagaatataaatggtttttaggaagttattattattaattttatatataaaatttgtgaaatgtgttaataaaagttttattgttttatttaaaatatttattgttataattgttaaatagtttatggataatttgatattgtattggtaggtgtaaggatgatatttggggaaatattggtttagatttttggtttttagtttaatatataaagaatttgaaagttattatttttgtttttataaagagaaataagttaaataaacggaaaattattaattttttttatatttattagagaaatgaggttaaagggtagtgttttgaaaagttaagattgaggtagatattgagaattatagtttattaatagtaaatgtttgttgttggtgttagtattaggtagagataaaaagtagagataagttatttttttgtattttgtataaatttttgatttatataatttgtgagtattataagttattttataattaaatttggaatatttttttatgatatttgcgatttatttaaataatatattatttttttagtgttttttaaatgtttataaattaaggaatattgatatataaatttttaagtaagagtaaagtattttaataagattggttgtaattgattattagtaaaatttattaaataatgagtgagaatagtatggtatcgtagtttttaaataggattttttatatttttaaaaatttaggtttttaaagaacgtttttgtttatgtattattaatattgattatattagaaattaaaattgagaaattttaaaaatattaatttatgatttaaaaataataatgaatttattgtatgttaatatatattttttaaaataatatatttttaaaataaaaaatttagtgagaaaggtattattttttattttttgtaaatttttaatatttggtttaatagagtataatatagttgaatttttttatgtgtttttggtatttaatttgttgtgatattattatgtattttttagaaaatggtattaaatttttgtgagataatgagaattttaaaaaggtaaatattttagtattattataaaaatgtttttgattttatagatcgtttttatattatgagaatttttggtataggtatattttattttattgtgtttagttttattgtattgtgtagatgttagttttaaaaatatacgtaaattttagggagaaagtagatgttgtagatttttttcggatattttttattagattaagaaagttttttttaatttttagttttttgcgagttttaatgatgagtagatattgagttttattaaatgttttttttgtatttatttagatattattttttttttttattgttttaatgtggtatattatattgaatgttgaataaataaattagaattttttaaataaatttttttttttgttcgtattttaagatgtttataatttatgttataagaaataattttgttaggtatttaagtttagtggttttataagaattgggttatgttaatttttttttattttttagaaaaatttgtataagataggtattaatttttttttaaatgttggaagaatttattagtgaagttatttgagtttggaggttttttttttgggtggttttaagtaatgaatttagtatttttaaatagatataaattaaaattattatattagttttgttttttagttaggtgtggtggtttatgtttgtaattttagtattttgggaggttgaggtaggtggattatttaaggttagaagttcgagataagtttggttaatatggtgaaattttgtttttattaaaaattaaaaaataagttgggtatggtggtatatatttgtagttttagttatttgagagaggttgaggtatgagaattatttgaatttggggaggtagaggttgtagtgagttgagattgtattattgtattttagtttgggtaatagagtgagattttgttttaaaaaaaaaaaaaataaataaataaaataaattttagtgtttttatgtatgtgtagaaattgaaaaatttgtaataaaatgtaaaagataatgaataaataaggtagttatgaagaattgtaattaagttagaggatttttattattagatattatgatttattataaaattataataattaagatattgtggtattagtttaatgataaatatataaagaaatggaaaagaaggagtatagaaatggaattatatataaggttatttgatttgtataaatgtttaattgtagttaagtgggaaaaggatggtttttttaataattggttttagaaattttatatagtaagagtatttgatttaattaataataattatgtaatatttttttgataatagtagtttattagtgttttagattaatgttttttaaagtatggtagttattatggaaaaaagatttttagttaaataaatttgggaaatgttgaatgtgtaggttttattttataggatttttcgtgattttaatgttatgttaattaaggatttataattttaaaaaatgttttatgaattttattttatattatattaaaaattaagttatagtagattatagatttaaaagtgaaaggtaaagtataagtttttagaagaaaaataggaaagaatttttatgattttggagtaggtaaaggttaaataggatataaaaggtttataaaagaaaagattgataaaatagattttattttatatagtgtattttattttgtttaaattatattttaataaaaagtaaaaaaggagtaaatagttatttaatttaatattaggaaaaagataaaaattatataggtaattatatttagagatagtgtgttttaggaaattttatagaagttttgagaaggatataaattataaaaaataattaaaaataaaagaatatgtatagttagttttttgtatttatgagttttgtatttatggatttaattaattttggattaaaaatatgtgagaaaaaattgtatttgtattaaatatgtatagatttttttttttgttattattatttaaataatatagtgtaataattatttatatagtatatgtattgtagtaggtattaaaagtaatttagagatgatttaaagtatacgggaggatgtgtataggtgatatataaatattatacgattttatataagtaattggagtatttttaaattttggtatttttaggagattttggatttaattatttatagatattgaggaataattgtatatttaaaaaaaacgattgatttttataggattttaagtagaagtggagtaagagattgaaagaaaagtttggtatatagtaaattagtaagggtttgatagataagttatataatttaataattaagaaaatgtatttatttgaaaattggtttaaaaaaaaaaaaaaaagaaagaaagaaaaaagattagtgtgtttaatttgttttttgtgtataaaatgtatttttagtaattaaagagttgatgaaggaaaagttttttatagaattttaataagtgtagaagaataaaataattagaaaattgttattttagttgggtgtagtggtttatgattataattttagtattttgggaggttgaggtgggaggatggtttgagtttaggagtttaagattagtttgggaaagacggcgtgattttatttttataaataatttaaaatagttatttgtggtagtgtcgtggtagcgttatggtggtgtatatttgtagttttagttattttggaggttgaggtaggaggattttttgagtttaggaggtttaggttgtagtaatttgtgattgtgttattgtaatttagtttgggtgataaaataagattttatttttttaaaaaaaaaaaaaaaaaaaaaaaaaggattattttggttaatattttcgaaattttatttttattaaaaatataaaaaattaattaggtatggagaagggggaggaggaggaataagtggaagaggaagaatattattattttaatttttaatgaaataatggatttgggtaattattattaatgtttgatttttaaaattattaggagaaaagttgataggaattttataatggttggattaggttgatagtatttgaatttatagattagttttaaattaatattaaaggttgttaagggtggggatagggaatgttaaaagtcgaaagtgaatttaattaagtttttttagttttaattataaggaaatttaggagatagaaaaagaagttaaataatattattaggaggtaattatttaaatttaatatagatatttttaatttacgatgggtttattgggatataattttattatgaattgagtagtatattgattgtattatttttttattatcgtaaagttaaaaaatattaagatgaattattgtaagttagaataaatgatttggtttttttaataagtaaatgttatggagatgaaaagaagagtaaaggaagagggttgttgttttttattagaagaaatttaataaatatataattaaattaaggatttttttggattttgatttgaataaaataaatgtaaaaagatatttttgagttaggattatttttttatttttaaatttcgatttaaaagtttttaattaattattttatttattaatttgttttttttttagaaattttatatagtaaatatatttgatttaattaataattttgtaatattgttttttttttaaatagtagtttgttaattttttaatagtaatgttttttaaaatattttaacggggatgttagtagatattaaagaaaaaaaggtgtggttaaataaattcgggaaatgttaaaatatatttttttttttttttttgttttttttttttttttttggtaggattttttatagtttttaatatgttaatgtaaaatgattaggggagtatttagagtatggtatttttgttaaagttatttgttatttgaatatttttttatagaatattttatgggattgatagaatttattttagaggaaattaaaattttaaaatatgtttatgtttgttatagttaagtgtatttagatgtttttaatttgattatttaaaaataaaataggagtattagttaaattatatattaagtaagtgatttgttttgtatggaaaaaaatattataaatatttatttaatagaaataagttataaagatttttataatttaaaatgtaaaaaatggttaaaaatattaaatattgtatatatatttggtagaatttatatgtaatttgaattttataagttgaataatttattatatttttttttttatggtaagaatattgaaaaataaagtggttttatattgttaaaaatagttttgaaatattttttgaaatagtagaaaataaagtgtttaaattattttttgtaatattattgttattttaaaattagttattattaataatttttataatagagtattgtttttgaaatattaatatatttatataaatattttaaatataggtattaatatatttaattttattaaagggattaaaagtggaagaaatatttaatttagtttttagggttgtgattgaagggtagttattaaaagagtaaaaaaatttttattttgaatattgatgagaatgatgtaatttagtaattttatatttttttttagaaagtttttaattttaaaaaatgtatttattgatatttagttttttagtttaatttattaaaatttatttgttttataatgtagttgatttatataaatagttttaattgtattagtttaaggataagtatagtatattgaaattatttagattgatgatttatttttaaaattttattaatggttttattttatggttattgaaattttatttagtggtaaataagagtaattatgtggttatttaaataagttaatggtgtatagaggaaaattgtattttttataattttgtttataaatgaagttttaagaatgttatgtttagaaaaatttggtaatttttgtggggaaatgtgtaattagttaaagtttagagttttggagtaaaggtggatttggtataggaaataagaagagagaaagtttttttttttgttttatgtaaaatttttatttgagagggttttatttttttatttatatttaattttattatgttgtttgcgaggagaggaaaaagaatattagaaaaatttaaggaaatttgtaatagttatgtttttgttattataagtagaatatgagttttatgagggtaaggaatttatttttgggttaatatttataatagcgtttagtttagtttagtataaggaatatttaaatattaattatatatagatataaagatgaagaaaattttttttgtatttgagaaatttttagtttagaggaaagaggaatatggaagtataatttttaattaatttggtaggaataagagttaaaatattatgagagtagagaggtagtggagggattaatttgatagttttagaaaaatttttagagggagttagtttttggtatttttttttttaattttttttattttttattatattattttttttttttataaaataagttttttatttatatagtagtttattttttagttaataaataaaaattttatttttttattattattttttaatatttagttaagagagttataaatattaatagtttaagtattttgagatagaaacgataataattttgggaggtttaaatgttatttttttgttaatttaattgaatttaaagtttataaatttaggtttattttttttttattgtagtgttgtaaatatgtttataatagaagtttggaagggaggttttgttgagttatagattgttggagaagttaatgattgtatatagataattgttaatatattatattattttttggtaagtaattataatttatattggtaggaaaattaattgttatgaaaagtattaggagagttttaggtaaaattttttagaagtcggtttttttgattttttttaattttttttttaatatttttttattttttttgtttttgagtttttattttgtatttggtatgagtattttttgttagatgttggggatgtattggtaaattaagatagatatttgtttttatggagtttttaagatagtgatggggtttatattaattaattaagtatttaatttagagtttttttttttataattttaaattaagaattaaaattattattgaatattataaatataaatttgattatttatttagtaaattttatagatttaattttttaggtatattttgagagatataaatttagttattatttatatttaatttgattttttaaatgttatttttaatatattatggtttatttaatagtattagattgtttgttattttttgaaaattatttttagtttgtatattattttagttttttttaaaatatatttttttaaatgaatgtttgttttttttgatattatattgttaaggtttattttaaataatattttttttgtgatattttttttataatttagattgaaaattttttttataagttatgttgtttatgttttgtttatagtaattatattgtgttttgtaatgttatttattatataatttgtgtgttttttttattttattttattgtttattattttttgaagaaatataatatagttaaaggaatatgagtttttgagttagaattggttttaaaatttggttttgttattcgtaagttatataatattgtgtaaggttttaagtaattttgtattttagttttattaattataatataagggtagtattatttattttatagttgttgtaagtattttaaaatagtatatgtaaagtatatagtataatgttcggtatatgagtattggataaaatggtagttgtagttttattatttttattgttattaaaattataaggttgtttttatttatcgttgtatttgtatagtattttatttgttaatagtaggtatagagtaattgttaaattgttaaaagaaattatattagttggatatattttaaaaaattaaaaaaattgtaatttgtaaaatgggtaagtttatatttattttatatggaaataataattttgtattttggagaagttattaatttttacgttttaaggttttaaagaaatagatagttaggcgtagtggtttacgtttgtaatgttagtattttgggaggtcgaggcgggtaaattatttgaggttaggagtttaagattagtttggttaatatggtgaaatttcgtttttattaataatataaaaattagtcgggtgtggtggtttatgtttgtaaattttagttattcgggaggttgaggtaggagaattgtttaaattcgggaggtcgaggttgtagtgagttgagatcgtgttattgtgttgtaatagagtgagattttattttaaaaaaaaaaaaaaaagaaaagaaagaaagaaatagattatattaaatattattatttttttaattaggaaaagtgtaaatagatgatttttattaaagagatagattagtaaatttgggtaatttaaagtttaaatattatgaaaaatttaaaatatgatttttttattttttagtaaattgtaaatatttttattttaattttttaatattggtgaaggtattttaagtaaattgttgaaatatatttatttatgaatataaagtaaaatgaaggttaaagtaaaatgtttaaaaagttaagttaaaattaaagtgttatattaatgtgtgtaaaaagtagaataatataattttttttttgagaaaaaaataataaaatatattaggaaattaggaataaatttaagtaataaataatttttaattttatagaggtaattatgaagtagttattgtatagatatatataagaaaaagtgtttttattttggaatgtttataatgttttgtgggtttaaaaaaaaaattagttaggcgaaaatgttaaagattaaaagttttaaattagattgtattttggatttgttttttttttattaataatttggtttaaagtgataatggtatttttaagcgaataaagagatttttttgaaaattattgatattataataatggatgaattttaaaataattatgttaagtgaaagtagatagttaaagaaattatattgtatgattttatttatataaaattttagaaaatgaaaattatagcgatagaaagtagattattggttgttgagggataggagtagaaggagtgggagggaaggattataaaggggtatgagaaaatttttgagggtgataaatttattattttgattgtggtgatggttttatgggtgtatatatataagttaaaacgtattaagttgtatattttgaatatgtataatttattataagttaattatattttaaaaagttgtttttaaaaggatattttgaattgtttgaaaaataataaattttgtttaaggtgtaatggtttatatttgtaatgatagtattttggggtgtcgaggtagaaggattagaggttaggagtttaagattattttggggaatataaggttttgtttttatataaaaaaaaaaaaaagtaatttaaaaattagttaggtatggtggtatgtgcgtgtagttttagttgtttaggaggttgaggtaggagaattttttgagtttaggattttgagattgtagtgaattatgtttttgttaatatattttagtttgggggatagagtaagattttattttaggaaaaaaaaataaaaaaaaaaaaaaaaaaaaattatatatatatatatatatatgtatatatatatgtgtgtgtatatatatgtatatatatatatatatataaatatttttaaaatattaattttaaggtttgtgaaataatttttttgttatagttgtatgaagttaaagattagggttaatgattatttgattatttataaatggtatttgttaattatttaagttagtgaaatttattttagtttttttttttttttttattttattatgggttggattttttattttatattttataaaaatttagtataatttttaggtttgaaatggtaattttttttttgttttttattggtaggggtttaataaagtgttttcggtattttatttaaattaaatataatatgaagttttatttttaatatttaaaaattttatttaggtatgtggttttggtagaatta

SEQ ID NO: 29 - DNA, 5687 bp, Artificial Sequence
  chemically treated genomic DNA (Homo sapiens)
gggatatggatgaaattggaaattattatttttagtaaattatcgtaagaataaaaaattaaacgtcgtatatttttatttataggtgggaattgaataatgagaatataaggatataggaaggggaatattatattttggggattgttgtggggtgggaggaggggggagggatagtattaggagatatatttaacgttaaatgacgagtaaatgggtgtagtatattagtatggtatatgtatagatatgtaattaatttgtatattgtgtatatgtattttaatatttaaagtataattaaaaaaaaaaaaaagtaatagtaagttttttacgagaggggcgggtgtagttttttatgtggacggtagagagaggagaggggttttttatttttgagcgtttgttttttattgttttaaatagtagttatatggtgttttggtgtgttagggattttgtgtattttttattttatttttatcgtattttaattgttttagtaggtgaggaggtatttgtttttttttttttttttttgtttttttgagatggagttttgtttttgttatcgaggttagagtgtaatggtgtaattttggtttattataattttcgttttttgggtttaggtaattattttgttttagtttttcgagtagttgggattataggtatgtatttttaaggtcggttaattttgtatttttagtagagatggagtttttttatgttggttaggtaggtttcgaatttttaattttaggtgatttgttcgttttggttttttaaagtgttgggattataggtgtgagttattatatttggtcgaggtatttgtttttaaaatagttaagaaaaagtagtaggtttgggatttgaatttagttttgtttggatttttttatattattagattatattttgttttttgtttattaggaattggttggaattttgtttttttgggattatttttttaggtttttgttttttaatttcgggatttttatttttgggggattagttattatgattttgtgttattttgatttggattttttgtttatttttttaatgtgtgttttgtttgtgtttttttttttaatgttgttttgtatcgtttgaaggtaaagtttaaatttgatgttattttttaatttatttaagtttagaaagggataattaatattaaattgtaataattttatttttttttttttttttttttttttttgtgagacgaagttttatttttgttgtttaggttggagtgcgattttggtttattgtaattttcgtttttcgggtttaagtaattttgttttagttttttaagtagttgggattataggtgtttttttattatgtttagttatttatttgtatttttagtagagatagggttttattttattggttaggttggtttcgaatttttgattttaagtgatttatttattttagttttttaaagtgttaggattataggcgtgagtcgtcgtatttagttaataattttaattttattttttttttttttttttttttttttttttttttttttagatagtattttattgttgtttagattggagtgtagtggtttgattatagtttattgtagttttaattttttgagttttagtgattttattgttttggttttttaggtagttgggattataggtgtatgttattacgtttagtttattttttaatattttgttgtagagatgagggttttattgttgtttaggttggttttaaatttttgggttttagagatttttttatttcggttttttaaagtgtcgggattataggtatgagttattatgtttagttttttgattgttttttaatgtggtatttgagattggagagggtgaggtttgtggaaagagtaggaagttttaggtgtgtatcggagtgaagttttttcgtggttgggtggtttgtttttttttgtgttttatttttttatttgtgaaatgaggataatttttttttttaggattgtaggaagtgttatttatgggaggtatggtagagcggtttggtatttttaaggtatttatttgttgaaggtgatttttagttaagtgagtgtaggtaggagttacgtttttttttttgttatttttttattagtgtttgagtttagggttttttgagttagattgaagggagaagaaatcgaaaggaaagaaaaaataggtattagtgaatattagaattgattaaaatgatataggtgagaataatgagatagaaaaagggattgtagagtcggtatattttgagggtggaatatggtgagataggaagattagggtttttggagagtgaggatatgggttttaggtttagatttgttatgttcgggttatttatttttgagtttttgcgattgagtttttttgtttttttttgtaaaatggaaatttgttagggaatggtttaagtttttgtgtttatttttgtgtaaattatttattaatggatttttggggggttgtatggtgtttttattgttttaaggtaggttttaagatttttaggtggttggatattttgtttcgtttgaagagtggtttggagttattttaggttggggtttattttttttagtggtttgaaggtttttaggatttagagtatttgatatagtttattatttatttagttttataaatttatttttttttgtagagtattgtttttgtgattaagatattatttttgtttcgaaggagtttatagatttttggtgagacggatatttagagtatttagatatagggtgtggtttgttttgtgttattgatatattttttgttatttttgtgtaaattgattttttgaatatttttatttatggtttttagggtgtgttattttaattttttgaatatatggggatttttttatgtttggttaaggggattagtatagttttaatgtttttgggatttttaagagttatttgatgtataagtaaaaatatgaattaattcgggggtagtggaggcggggaagatggggtaggatgtgttatgtgtttttttatagagtttagaagtgatatgggagtcgaggagtgggttaggagggttttttggagtaggtgatatttgaattgggttttggaggatgagttagaatttgttaggtatgtttttttagtatagggattagtatttgaaaaaaaaaaaaaaaaagtttgaatgatgtgaattgtttattggttaagtgggtgtaggatgatgatggtgaagtgagttatgtaaagtagaagagatagatttaagagcggtattacggtttaagattttgagtagtataggtaaatagagaaaagtagaacgattatttaattttgatatttaaggatagttattatatgtatatatatttatgtttttaagagaatttatacgtgtttttttttaaagaaagattatgtagtgttttttttttttatgtttgggattttgttttgttttgttttgtttttgagacggagttttatttttgtcgtttaggatggagtgtaatggcgagatttcggtttattggtttttttagtttaagtgattttcgtattttagtttttcgagtagttgggattataggcgtacgtcgttacgtttagttaatgtttgtatttttggtagagatggggttttattatgttggttaggttggttttgaatttttgattttaggtgatttgttatcgcgtttggttagggagttgttttaaatagatttttttttttttttttcgggatgttaattttggtgttgcgtggggagtaacgtggagagtaaagaatatttaagtgagtagttgttattatagttatcgggatagtgcgggaggagtagttttttaggtaaagatcgtgggtagaggggcgcgtggcgggtgagagggaggagttcgcgttgatttacgggtttttggtttaggaaatagtggagttgttgatatttttatgaggaagtcgggtaagtttggaggggtagataattaattgggatgggaatatttcgggtattcgtagaagtgtttcgcgggttgtggtttcgcgtgggggattttttaggttcgtatttttgtttggggtatttgcgaggcgttaggtaagttgtttggggcggggagtgcggtttgagcgtttaggtttaagtttcgatgcgcgggttttttttcgtttaggtcggttttcgttatttcgtttttataggtgagggtgtttgttttgtcgttttgggatgcgaataggcgtgaggtttttttattttttagtgttacgaggtagggcgggattcgaatttcggttttgttattttttgtttcgattattttggagtagttgttcgtttttcgttttagtttttttattcgtttatttcgtcggtaggatttaagggcggtttgtaatttgtagaggttattttatttttttggtcggcggcgaaggttagtggcgcggtttgggttggggtcgtttcgatcgttttcgatcgacgttatttaggagggtttggggaaggggacgcgaggagttgggaatacgtagcgtcgttttagcgggacgggcgggttcgggttggcgtcgaattcgcgttcgagagtttagttcgcggttaggtcgtcgttttcggagttcgttggggttcggagtttcggttttttacgtttggtcgttattagaataaaagttgtggtttagttcggagtttaggcgtttcgtaggtttggttcgcgtcgggtcgttagtttttttacgtttggcggtcgcgtttttagtttttcggttcgagtacgttcggtttttttcgttacggtcggcgtaggtggagggggcggggcgggggtcgtgcgtggtgacgtcgcgggggggtgacgtatcggcgtgtttcgtttttatttttttttcgtttaggttttggaaagagaagaaaaaaaatttttttttttttttaattgaggaattaatagtcgttattttgtcgcggattcgatcggggtttcgagcgcgatttattcggtttcgtcggtttcgggttttataatcgttcgcgtatttcgtttcgttcggtcggttcgtttcgttcggttttcggcgttcgtttcggcggtttcgttcgtttttcggttcggtttttcggagttcggcggcggcggcggcggtagcggcggcggcggcggcggaacggggggtgggggggtcgcggcggcggcggcgatttcgttcggcgtattgtttttttttacggcggcggcggcggcgggtcgcgggtcgggagcggagttcggagttttttcgtcgtcgggtcgcgagcgaatttattaagtggggcgcggggggggagcgaggcggcggcggcggcggtattatgttttcggggattgtttgagtcgttcggtcgggcgtcgtcgttgttagtcgggttcgggggggcggtcgggtcgtcggggcgtttttatcgcggagtgtcgcgttcgggaggcgggtaggggatgagggggtcgcggtcggcggcggcggcggcggtcgggggcgggcggtgagcgttgcggggcgttgttgttgtggttgagatttggtcgtcgttttttttattcggtttgcgttttttttttttttcggcgttcgttcgttcgttcgcgg

SEQ ID NO: 30 - DNA, 5687 bp, Artificial Sequence
  chemically treated genomic DNA (Homo sapiens)
tcgcgagcgggcgggcgggcgtcgagggagagggagggcgtaggtcgggtgggggaggcggcggttaaattttagttatagtaatagcgtttcgtagcgtttatcgttcgttttcggtcgtcgtcgtcgtcgtcggtcgcggtttttttattttttgttcgtttttcgagcgcgatatttcgcggtgggggcgtttcggcggttcggtcgttttttcgggttcggttggtagcgacggcgttcggtcgggcggtttaggtagttttcgagaatatggtgtcgtcgtcgtcgtcgtttcgtttttttttcgcgttttatttaatgaattcgttcgcggttcgacgacgagggggtttcgggtttcgttttcggttcgcggttcgtcgtcgtcgtcgtcgtgaggaaaaataatgcgtcgagcggggtcgtcgtcgtcgtcgcggtttttttatttttcgtttcgtcgtcgtcgtcgtcgttgtcgtcgtcgtcgtcgtcgggtttcgggaggtcgagtcgagaggcgagcggggtcgtcggggcgggcgtcgagggtcgggcggagcgggtcggtcgggcggagcggggtgcgcgggcggttgtggggttcgggatcggcggggtcgagtagatcgcgttcgaagtttcggtcgggttcgcgataagatggcggttgttgattttttaattaaaaaaaaaagaaagtttttttttttttttttttagagtttgaacggggagggggtgggggcggggtacgtcggtgcgttattttttcgcggcgttattacgtacggttttcgtttcgttttttttatttgcgtcggtcgtggcggaaagagtcgagcgtgttcgggtcgaagggttgaaggcgcggtcgttaagcgtagggaagttggcggttcggcgcgggttaggtttgcggggcgtttgggtttcgggttgagttatagtttttgttttgatggcgattaggcgtagagggtcggggtttcgggttttagcgggtttcgggagcggcggtttggtcgcgggttgggttttcgggcgcggattcgacgttagttcgggttcgttcgtttcgttggggcggcgttgcgtgtttttagtttttcgcgtttttttttttagatttttttaggtggcgtcggtcgggaacggtcggggcgattttagtttaggtcgcgttattagttttcgtcgtcggttagggaagtggaatggtttttgtaggttatagatcgtttttgggttttgtcgacgaggtgggcggatggggaaattgaggcggggggcgagtaattgttttaaagtggtcgaggtaggaagtggtagggtcgggattcgggtttcgttttatttcgtgatattagggagtgagggggttttacgtttgttcgtattttaaggcggtagggtagatatttttatttgtgagagcggggtggcgagggtcggtttgggcggagaagggttcgcgtatcggggtttaagtttggacgtttaggtcgtatttttcgttttaggtaatttgtttggcgtttcgtaggtgttttagataggggtgcgggtttggggagttttttacgcgagattatagttcgcgggatatttttacgaatattcgaggtgtttttattttagttagttatttgtttttttaaatttgttcggtttttttataaaggtattagtagttttattgttttttaagttagaaattcgtgagttagcgcggattttttttttttattcgttacgcgtttttttatttacggtttttatttgggagattgtttttttcgtattgtttcggtggttatggtggtagttatttatttaagtgttttttgttttttacgttgttttttacgtagtattagagttaatatttcgaaaagagagggagaaaatttgtttaaaataattttttggttaggcgcggtggtagattatttgaggttaggagtttaagattagtttggttaatatggtgaaattttatttttattaaaaatataaatattagttgggcgtggcggcgtgcgtttgtaattttagttattcgggaggttgagatgcgagaattatttgaattggggaggttagtaagtcgggatttcgttattgtattttattttgggcgataagagtgaaatttcgttttaaaaataaaataaaataaaataaaattttagatatagaaaaagaaaatattatatagtttttttttaaaaaagaatacgtatgaatttttttaaaaatataggtgtatgtatatatggtgattgtttttgagtgttaagattgagtgatcgttttgtttttttttgtttatttgtattgtttaaaattttgggtcgtgatatcgtttttgaatttgttttttttattttatatggtttattttattattattattttatatttatttggttagtaggtagtttatattatttaggtttttttttttttttttttaaatgttggtttttgtgttgagaagatatgtttggtaaattttaatttattttttagaatttagtttaaatgttatttattttaggaagtttttttagtttatttttcggtttttatattatttttgggttttgtgagagaatatataatatattttgttttatttttttcgtttttattgttttcgaattagtttatgtttttatttatgtattaaatagtttttgagaattttaagggtattgagattgtgttaatttttttggttaaatataaagagatttttatatatttaaggagttaaaatagtatattttggaagttataaatggaagtatttaagaagttagtttgtataggaatggtaagaagtgtattagtggtatagggtaggttatattttgtatttgaatgttttgggtgttcgttttattaagggtttgtgagttttttcggggtaaagatggtgttttagttatagaaatagtgttttgtaagaagaagtaggtttgtaaaattgaatgagtgatgagttgtgttaggtgttttgagttttagaggtttttaggttattgaaaagggtgggttttagtttgaggtggttttaggttattttttaaacgggataaggtgtttagttatttagaggttttagggtttgttttggggtagtggagatattatgtagttttttaggggtttattggtgagtggtttatatagaagtgggtataggagtttgagttattttttgataggtttttattttatagaggaaagtaagggaatttagtcgtaaggatttagaagtaaataattcggatatggtaagtttgggtttggaatttatgtttttattttttaaagattttagtttttttgttttattatgttttatttttaaaatatatcggttttgtagtttttttttttgttttattgtttttatttgtattattttgattaattttggtatttattgatatttgtttttttttttttttcgattttttttttttttagtttgatttaaagaattttgagtttagatattgatgggggaatagtaaggagggaagcgtggtttttgtttgtatttatttagttggggattatttttaataagtgagtgttttagggatattaggtcgttttgttatgttttttatggatagtattttttataattttggaaggaaaaattgtttttattttatagatgaagaaataaggtataaaggaggataagttatttagttacgaaggggttttatttcggtgtatatttaaggttttttgttttttttataaattttattttttttagttttagatattatattaaaaaataattaaaggattgggtatgatggtttatgtttgtaatttcggtattttaggaggtcgaggtggaaggatttttagagtttaggagtttgagattagtttgggtaatagtgagatttttatttttataataaaatgttaaaaagtgaattgggcgtggtggtatgtatttgtagttttagttgtttgggagattaaggtaataggattattggagtttaggaggttgaggttgtagtgagttatgattaaattattgtattttagtttgggtaatagtgagatattgtttaaaaaaaaagaaaagaaaagaaaagaaagagaaagaaatggaattggaattgttggttggatgcggcggtttacgtttgtaattttagtattttgggaggttaaggtgagtggattatttgaggttaggagttcgagattagtttggttaataaggtgaaattttatttttattaaaagtataaataaatggttgggtatggtgggggggtatttgtaattttagttatttgggaggttgaggtagaattgtttgaattcgggaggcggaggttgtagtgagttaagatcgtattttagtttgggtaataagaatgaaatttcgttttataaaaaaaaaaaaaaaaaaaaaaagaaatggaattgttgtaatttgatattgattgtttttttttaggtttaaatagattaaaagatagtattaggtttggattttgtttttaagcgatgtagaatagtattggggagaaaaatataaataggatatatattgaaaagataagtagagaatttaagttagaatagtataaaattataataattgattttttaggggtgggagtttcggggttggggggtagaggtttgggggagtagttttaggaaggtaggattttagttagtttttggtggatagaaggtagaatgtggtttggtggtgtggagggatttagatagagttaggtttaagttttaaatttattgtttttttttagttgttttgaaaataaatatttcggttaggtgtggtggtttatatttgtaattttagtattttaggaggttaaggcgggtagattatttgaggttgggagttcgagatttgtttgattaatatggagaaattttatttttattaaaaatataaaattagtcggttttggaggtgtatgtttgtaattttagttattcgggaggttgaggtaggataattgtttgaatttaggaggcggaggttgtggtgagttaagattgtattattgtattttagtttcggtaataggagtaaaattttattttaaaaaaataaaaaaagaaaaaaaaaaataaatatttttttatttgttgagatagttgaggtgcggtggagatgagatggagggtgtatagggtttttggtatattaaggtattatatagttgttatttggggtagtgggaagtaggcgtttaagggtgagaggttttttttttttttttgtcgtttatatgggaggttgtattcgtttttttcgtgggggatttgttgttgtttttttttttttttaattatattttaagtgttagggtatatgtgtataatgtgtaggttagttatatatttatatatgtgttatgttggtgtgttgtatttatttattcgttatttagcgttaggtatattttttaatgttattttttttttttttttttattttataatagtttttagagtgtgatgtttttttttttgtgtttttgtgtttttattgtttaatttttatttatgagtgagaatatgcggcgtttggttttttgtttttgcgatagtttattgagaatgatgatttttaattttatttatgtttt

SEQ ID NO: 31 - DNA, 6158 bp, Artificial Sequence
  chemically treated genomic DNA (Homo sapiens)
ataaggaagtaatgtttttattaagtttgtttaattgttagatggaaattgtatttgtttgttatttgggggatttatggaaatattgtaattgataaaatttatagttataaaaatattgtaatatatgtgttaatagtgttgtatttgttttatgaatgatgttggttgatatatatatatatatatatatatatatatatatatataattgtgggtaaaaaagtagttgtaaaattaatagatttgtgttttggatgtcgagtgaagaaaatgtttttaggtcggatatagtggtttatagttataattttagtattttggaaggttgaggtaataggattatttgaggttaggagtttaagattagtttgggtaataaagcgagatttttatttttataaaaaaatttaaaaattagttgggtatagtagtgtatgtttgtagttttagttatttgggaggttgaggtagggggattgtttgagtttgaggttatagggagttatgatttgtgttattgtattttagtttgagtgaaagtaagattttgttttatttatttatttttatttttattgttaagattttgttgtgtgtgtgtgtgtttttaaaaaaaggttttaaaagaagggagtgattaattttattaaatattgttggtagaattttataagataaagaggattaaaattgattagtgtatttggtaattgggaagttataggtgattaggaaaagagttgtttttggatgttttatagttgttattgttattgtgaggaaatttttttatttatgattttttttttttttttttttttttgagatggagttttatttagttttttaggttggagtgtagtggcgagattttagtttattgtaagttttatttttcgggtttacgttatttttttgttttagtttttttaatagttgggattataggcgttttttttattacgtttagttaatttttttttttgtattttttagtagagatggggttttatcgtgttagttaggatggtttcgattttttgattttgtgatttatttattttagttttttaaagtgttgggattataggcgtgagttatcgtggttggtttatttatgatttttttttaattattaatttatattttttgaaatagggtttttttttgttgtttaggttggagtgtagtggtgtgattatagtttattgtaatttttaatttttgggtttaagtaatttttttattttttaagtagttgggattataggtatgcgatattaaaattagttaatttttaaaattttttgtagaggggttatgcgatgttgtttaggttggttttaaatttttgtgtttaagtgattttttttttttggttttttaaagtgttgggattataagcgtgagttattatatttagtttttttatattttatgtgaatatggaagagaatgttattatttatagaaaatataaattgattattttgggattgttataatgtttgtaatttatttttatattattttgtgaataaaattttaaattgtaatattaaaagattttaggtagaaaaataaaaataaaaaataatttggttttttttgttaaaaaaaaaattatgtacgtaaatatatatatataaagtaaatatattaaaatgttaattaaggtggtagttatataggtatttattgtattattatttaaatttttatttttatatttgttaaaaatattggaaaaaatgagggttaggcgttatagtttatatttgtaattttaatattttgggaggttaaggtagacggattgtttgagtttaggagtttaagattagtttgggtaatatggtgaaattttgtttttattaaaaatataaaaattagttaggtatggtggtaggcgtttataattttaattatttagaaggttgaggtaggagaatcgtttgaatttgagaggtagaggttgtagtgagttaagatcgtgttattgtattttagtttgggcgatagagggggattttgttaaaataaaataataaattggaaaaaatggtatttgagataaattttgaaagagtatgaatattgttttaagattttgttgtttttatattagtttaataaagaaaaattagaaggtagataaaaagagtaaatttatggggtttttaatgtagatataatcgtttttaatttttttaagttatatataggttgaggttggatgtggtggtttacgtttgtaattttagtattttgggaggttaaggttagtggattatttgaggttaggagtttaagattagtttgattaatatggtgaaattttgtttcgattaaaaatataaaaattagttcggtgtggtggtgggagtttgtaattttagttattaaggaggttgaggtacgagaattatttgaatttaggaggtagagtttgtagtgagtcgagatcgtattattgtattttagtttgggtgaaagggcgagatttagtgttaaaaaaaaaaaaaaaaaaaaaaaaaaaaaaaaaatatatatatatatatatatatatatatatatttataataggttgagtatttttaatttaaaaatttgggttaggcgcgttagtttacgtttgttattttaatttttggggaggtcgagttgggtggattatttgaggttaggagtttagattagtttggttaatatggtgaaattttttttttattaaaaatataaaaaaattagttagggcggtggtaggcgtttgtagttttaggtatttgggaggttgaggtaggagagtggagtgaatttaggaggcggagtttgggagtttgtagtgagtcgagattgtgttattgtattttagtttgggcgatagagcgagatttcgttttaaaaaaaaaaaaagaaaaagaaaaaatataaaaattagtcgggcgtggtggcgtacgtttgtaattttagttatttaggaggttgaggtaggagaatcgtttgaatttgggaggtgtagggtgtagtgagtcgagatcgtattattgtatttcggtttgggcgatagagtaagattttgttttaagaaaaaaaaaaaaaaaaatttaaatgttttaaaatttaaaacgttttaaaatttaattttttaagtattgatatgatttttaaaggaaatgtttattggagtattttagattttggatttttagattaggatgttaaagtggtaagtatatatacgtaaaatatttttatattttgtttttttttatttaatacggtggttgtttttttgttagttatcgtatattagtattagtttgttgtgtgatattttattgtagagataaattttgtgatatttttaattagttttttattgttggatggtgtaatgaatatttgttaatatatattttttgtttatgtgtttgattattttaagggtaagattttagtttgtggaaagggagtaagtgtaagtttgagtagaggaaaggagatttaaaagaataaggcgagtttgggaatagtttattaggttattttagggtattggattttcgtaggcgagaaatgtttgtagatatttaacgatgacgtttaaatggaagagtagtttgagaagatttagtattatttaattttttattttttattttttttgagacggagtttcgttttgtagtttaggttggaatttcggtttattgtaattttcgtttcgcgggtttaagcgatttttttgtttaagtttttcgagtaattgggattataggcgtaaattattacgttcggttattttttttgtatttttggtagagacgagattttattaagttggttaggttggttttgaatttttgattttatttatttattttttgagacggagtttcgttttgtcgtttaggttggagtgtagtggcgcgatttcggtttattgtaagtttcgttttttaggtttacgttagttttttgttttagtattcggagtagttgggattataggcgttcgttattacgttcggttaatttttttttttgtgtgtgtgtatttttagtagagacggggttttatcgtattagttaggatggttttattttttgattttgtgattcgttcgttttagttttttaaagtgttgcgattataggcgtgagttatcgtatttggtttagaatttttgattttaaatgatttattcgttttggttttttaaattgttgggattataggcgtgggttatcgcgtttagttaattttatttaattttaatgttaggtattgttttaatatttttttatgtataatttattttatttgtaggtattattattatttttatttataggttagaaagttgaggtacgaagtttaattattagagttatttattttcgttaaaatttaagtagtttgggttataaataattatatttattttgtagttaaggaattaagttgagatgttgagttgaaaatttaggttttagattttaaagttttttatataagagtcgacggtggtagtaaaaattaatgggggtttgatttattttttttatttttaagaaaagtaaaaagtaggagttgggattagagaaaatttttacggagtttttattttttaaatataagaggtatttaacgtttagtattgttgatttgtaattaggttttaattgtgagtagttaggttttaaagtttgataattgaattttaaaaagcgcgcgagtttttaggcgaaatagtttttcgttttttagtcggttggagtcggtttagtaatagtttttttaagttagggtagtgacgttagtttaggaattgggttcgtttcgggatttcgttgttttttgtacgttcggaataattagagtcgcgaaattagtttcgtttattgtttcggaagttaatgcggaagttatatatttttttttcggtcggtaggggcgtagttattttaatttatatttgagtgggcggtggcgattggtgttggcggtttggtttagttgggtagggggtaattttattgatttgggggtggtttttagtttaattttttttttttagttttttatcgacggttagtgcgtacgttgtaattagttgaggttatgttaggagacggagttacggagtaggtgaggaaggagagtggtggggtttcgtggcgattttttttttacgtttgttttttcgattgttttagatatgttcggttgaggaaggaattgggtttagtgaattcgggggatagggtatatagaagagtggtgggaatggggagtaagatttaagatttaatttttttttttttattttttttttttaggtatgaatacgagtaaatatttgatttagataatagcggtaggttgtttcgttttatttagatttatgggattattttagatgggatgtttttttttgatatcgttttggtattagagtggataggaattattttaacgtgtattcgacgttttagaaaaatttgatagtgttttttttatttcgttaaatatattgtatttagaaataggttattagtttgagaaatatttgagataaagttaatttggagaattaagatttaatgagagcgagtgaagaaagaagtaagttatgttgaggttttgggaattttgtggttttttttcgttttttttttttttagttatatttcgtttttatttttttagttatataaatattgtaggtataagttgaaaatgagaagtttgttttggttattgtaaataaaagtatttgttttaatagtaaatatgagtgataattaaatattttaaaatttatatttttaggttagattagtgtgatttgttttttttgttttttgtatttagaattttgtaggatagtatttattttttagtgtgaaagaggaagttaaatagttatgaaaaatgttattaaatgtgtttttcgatttaagttttggtgtgtttagataaatatagtttttaaaatggaggttaggtagtttgtagttttaattttttgaaattttttattgttatagtaacgatatgtatttaggttttcgttttttaggttttttagtttataacgtggaagatgttattggaggttggtagagatgaggtaaaataggagcgt

SEQ ID NO: 32 - DNA, 6158 bp, Artificial Sequence
  chemically treated genomic DNA (Homo sapiens)
acgtttttattttgttttatttttgttaatttttaataatattttttacgttataagttagggaatttgaaaaacgaaaatttaagtgtatgtcgttgttatggtaatgggaaattttaggaaattgagattgtaggttatttagtttttattttagaaattgtatttatttaaatatattaggatttagatcgaaaaatatatttaatggtattttttataattatttagtttttttttttatattaaaaggtaaatattattttataaaattttgaatataaagagtaaaagaaataaattatattgatttaatttaaaagtgtgaattttaaaatatttagttgttatttatatttattattaaaatagatgtttttatttatagtggttaaaatagattttttatttttaatttatatttgtaatgtttatgtagttggaaaaatgaaaacgaaatgtggttaaaagaaaagaaaacgaaagaaagttataaaatttttaaaattttagtataatttgtttttttttttattcgtttttattaagttttaattttttagattagttttgttttaaatattttttaaattagtaatttatttttgggtatagtatatttggcggggtaaaagaaatattgttaagtttttttaaaacgtcgggtgtacgttaaaataatttttatttattttaatattaaaacgatattaaaggaaagtattttatttggagtagttttatgaatttaaataggacgaagtagtttatcgttattgtttaaattaagtatttattcgtatttatgtttaagagagagaagtaaaaaaaaaaaaattaaattttagattttgttttttatttttattatttttttatatattttgtttttcgggtttattagatttaattttttttttagtcgaatatgtttggagtagtcggaggaatagacgtggagaagaggtcgttacgaggttttattattttttttttttatttgtttcgtggtttcgttttttgatatggttttagttgattataacgtgcgtattgatcgtcgatgggaagttagaaaagaaaaattaaattaaaaattatttttaaattagtaaagttattttttgtttagttgagttagatcgttaatattaatcgttatcgtttatttaaatatgaattaaaatggttgcgtttttgtcggtcgaggaggaggtgtgtggttttcgtattaattttcggggtagtgggcggggttaatttcgcgattttggttatttcgagcgtgtagaaagtagcgagatttcggggcgggtttaatttttgggttgacgttattattttggtttggagaggttgttgttgagtcggttttaatcggttggaaggcgggaagttgtttcgtttggaggttcgcgcgttttttggaatttagttattaagttttagagtttggttatttatagttgaagtttgattgtaggttagtaatgttaaacgttaaatgttttttatatttaggggataaggatttcgtggaggttttttttggttttagtttttgttttttattttttttgggggtgggagggatagattaagtttttattaatttttattgttatcgtcgatttttgtgtagaaagttttgaagtttgagatttgggtttttagtttaatattttagtttggttttttgattgtaaagtaggtataattgtttgtagtttagattgtttggattttaacgaagataagtaattttggtaattaaatttcgtattttagttttttggtttatagatgggaataataatagtatttgtaagtgaaataaattatatatagaaaagtgttagaatagtatttggtattaagattaaatgagattgattgggcgcggtggtttacgtttgtaattttagtagtttgggaggttaaaacggatggattatttaaagttaggagttttaggttaggtgcggtggtttacgtttgtaatcgtagtattttgggaggttgaggcgggcggattataaggttaggagatgagattattttggttaatacggtaaaatttcgtttttattaaaaatatatatatataaaaaaaaaaattagtcgggcgtggtggcgggcgtttgtagttttagttatttcggatgttgaggtaggagattggcgtgaatttgggaggcggagtttgtagtgagtcgagatcgcgttattgtattttagtttgggcggtagagcgagatttcgttttagaaaataaataaataaagttaggaatttaggattaatttggttaatttggtgaaatttcgtttttattaaaaatataaaaaaagtagtcgggcgtggtggtttgcgtttgtagttttagttattcgggaagtttaagtaggagaatcgtttgaattcgcgaggcggaggttgtagtgagtcgagattttagtttggattatagagcgagatttcgttttaaaaaaaataaaaaataaaaaattaaatgatattaaatttttttaaattgtttttttatttaagcgttatcgttagatgtttgtaagtatttttcgtttacgggggtttaatgttttaaaataatttagtgaattgtttttagattcgttttatttttttaggtttttttttttttgtttaaatttatatttattttttttttataggttgaaattttatttttaaaataattagatatatgagtaaaagatatgtattaatagatgtttattgtattatttagtaatggaggattggttaaaaatattataagatttatttttgtaatggaatattatatagtaaattgatgttaatgtacgatgattgatagaaaggtaattatcgtattaaatgaagaaaagtagaatatgaaagtgttttacgtatatatatttattattttagtattttaatttgaaaatttaaaatttgaaatattttaatgagtattttttttgagagttatgttagtgtttaaaaagttagattttggagcgttttgagttttggaatatttaggttttttttttttttttttttgaggtagagttttgttttgtcgtttaggtcggagtgtagtggtgcgatttcggtttattgtattttatattttttaggtttaagcgatttttttgttttagttttttgagtagttgggattataggcgtgcgttattacgttcggttaatttttgtattttttttttttttttttttttttttgagacggagtttcgttttgtcgtttaggttggagtgtagtggtataatttcggtttattgtaagtttttaagtttcgttttttgggtttattttatttttttgttttagttttttaagtatttgggattataggcgtttgttatcgttttggttaatttttttgtatttttagtaaagaaggggttttattatgttggttaagttggtttgaatttttggttttaagtgatttatttaattcggtttttttaaggattgggatgataggcgtgagttaacgcgtttggtttagatttttgaattagggatatttaatttgttataaatatatatatatatatatatatatatatatattttttttttttttttttttttttttttttttttgatattgagtttcgtttttttatttaggttggagtgtagtggtgcgatttcggtttattgtaagttttgttttttgggtttaagtgattttcgtgttttagtttttttagtagttgggattataggtttttattattatatcgggttaatttttgtatttttagtcgagataggattttattatattggttaggttggttttgaatttttgattttaggtgatttattggttttggttttttaaagtgttgggattataggcgtgagttattatatttagttttaatttgtatatagtttaaaaaaattaaaagcggttatatttatattgggggttttataaatttattttttttatttgttttttgatttttttttattgaattgatgtaagaataataaagttttaaaatagtatttatatttttttaaagtttgttttaaatgttattttttttagtttgttgttttgttttgatagggtttttttttgtcgtttaggttggagtgtagtggtacggttttggtttattgtaatttttgttttttaggtttaagcgatttttttattttagttttttgagtagttaggattatgggcgtttgttattatgtttggttaatttttgtatttttagtagagatagggttttattatgttgtttaggttggttttgaatttttggatttaagtaattcgtttgttttggttttttaaggtgttgggattataggtgtaagttatggcgtttggtttttattttttttagtgtttttaataaatatagagataaaagtttaaataataatgtaatgaatatttgtataattattattttgattaatattttagtgtgtttgttttatatgtatgtatttacgtatatagttttttttttggtagggggagttagattattttttatttttatttttttgtttagagttttttagtattatagtttgaggttttgtttatagaataatatgaaaataaattatagatattgtgataattttaaaatggttaatttgtattttttgtgaataatgatatttttttttatatttatataagatataagggggttgagtgtggtagtttacgtttgtaattttagtattttgggaggttaagaggggaagattatttgagtataaaagtttgggattaatttgggtaatatcgtatgatttttttataaaaaattttaaaaattagttgattttggtgtcgtatgtttgtggttttagttgtttgggaaatgggaggattgtttgagtttaggagttaaaagttgtagtgagttatgattatattattgtattttagtttgggtaatagagagagattttgttttaaaaaatgtaaattgatgattagaaaaaaattataagtaggttagttacggtggtttacgtttgtaattttagtattttgggaggttgaggtgggtggattataaggttaggaaatcgagattattttggttaatacggtgaaattttatttttattaaaaaatataaaaaaaaaaattagttgggcgtggtggggggggcgtttgtagttttagttattggggaggttgaggtaggagaatggcgtgaattcgggaggtggagtttgtagtgagttgagatttcgttattgtattttagtttgggagattgagtgagattttattttaaaaaaaaaaaaaaaagaaaaaaattataaatagaaagatttttttataatagtaataataattataaaatatttaggaatagttttttttttggttatttatgattttttaattgttaaatgtattggttagttttagttttttttattttatgggattttattagtagtatttgatgaagttgattattttttttttttggaatttttttttaaaaatatatatatatataataaagttttaatagtgaaaataaaaataaataaataaaataaggttttgtttttatttaggttggagtgtagtggtataaattatggttttttgtggttttaagtttaagtaatttttttgttttagttttttaagtgattaggattataggtatgtattgttgtgtttagttaatttttaagtttttttgtagagatgagggtttcgttttgttgtttaggttgattttgaatttttggttttaagtgattttgttgttttagttttttaaagtgttgggattatagttatgagttattgtgttcggtttggaaatattttttttattcgatatttagaatataagtttattggttttgtaattatttttttgtttataattatgtgtgtgtgtgtgtgtgtgtgtgtgtgtgtgtgtgttagttaatattatttataaaataaatataatattattaatatatatattgtaatatttttgtgattatgaattttgttaattgtaatgtttttatgaattttttaggtggtagataaatataatttttatttaataattaaataaatttggtaagaatattgtttttttat

SEQ ID NO: 33 - DNA, 9293 bp, Artificial Sequence
  chemically treated genomic DNA (Homo sapiens)
tttttatgttttttttttggagttttatagttttaggttttaagtttaagtttttaatttattttgggttgatttttgtatatagtataagatgagtttaattttatttttttgtatgtggaaatttattttttttaatatttttatttaaaagattattttttttatattgtgttttttggtattttttttttttttttgagattgagttttgttttgtgtttgaatttttaggttaagaatatttaatggtagtagttatagttgtttaaagttattaatggtatttgggagaaagattagttgaaatgttagttaatgttgttgtggattgtgtttgtatgttttaaaaacgttttgtgggtcgggcgcggtggtttacgtttgtaattttagtatttagggaggtcgaggtgggcggattacgagtttaggagttgagatttgtttggttaatgtggggaaattttatttttattaaaaaatatattaaaaaattagtcgggtacggtggcgtttgtttgttgttttagttattttggaggttgtggtacgagaattgtttgaattcgagaggcggattgtgttattgtattttagtttgggcgatagagtaagatttcgttttaaaaaataaaaaaataaaaatattttgttatttatttattgtgtgtaaagaaatatatattgtaaaattatttatattttgataattaggtgtatttatttttgttgtattaaatgtattataagttgttaattttttatataatatttgtaatgagtattttgtaatatatagattttaattaattatttttttaaggttgaaataattatgtttagtagaagttttattaataaattgtatatgtttttgttatagtatgatgaatatagtgttatatttttttgatgattttagtttattttataagtatgtagtaaaatagttttttttgttaagttgtatatatttgatggtttttatgtttttttagtatgttattttgtttttagattttagatttgtaggaagtatattgatttttatttttgtatttatgatggtttttgtatttcgttttttaggtattaatgaagattataaggggaaatttataattaagtttattaagttgataaatattattttatagaagtagttgagtttgtgtagataaatttatgggttgtgtaattattatttaatgtttagggttttttattttttttgttttttattattttttgggttgatttagtttttttaataaatttgtatgttgttagttagaacgttgttttattttttagttatattagaatttttataggagaaaatttttaaattgaaggagtagtaaaatttttggtaagaaaggattaggtggtagtacgattatgattggttgggtgcgttgtattttgttttttatttgtagttttaaaatttgaaaagtttagaaaattaaaatttttttgtttgtttttttgagacggggttttatttttatttaggttggagtgtagtggtatgattttggtttaatgtaattttcgtttttcgggtgtaagcgattttttagttttagtttttcgagtagttgggattataggtatatattattacgttcggttagtttttgtatttttagtagagatagggtttcgttatgttggttaggttggtttcgaatttttgaatttaggtaatttgtttatttcggttttttatagtgttgggattataggcgtgagttatcgtgtttggttttaaaggtattttttttgaatttagtgtaaatttattttgattagatgttaatagtttttattttattttatgttaatattttttgttttattgtaaaatattagtgtatttgatttaatatttttgtagggggagtgggggtgtttatttaataattaatatatagtatatgtattgtatcgtttttaaagtttcgattttaaattttattattgagacggggttttgttgttgtgttatttaggttggtatgtagtggcgcgattatagtttattaaagttaaaattttgtaggtttaaattatttttttattttagttttttgagtagttgggattataggtgtgtgttattataattagttaatttttgtattttttttattagtttcgttatgtttttttggttggtttcgaatttttgagtttaagtattttagagtattttttaaagtgttgggattataggtaagagttattgcgtttagttagttttaaagtttagaattttttttttaaaaattttttttaaaagttttaaattttgaaatatttggttgttagggttttagataagagattgtggattaaaaattaagatgttttgaaaagtgtttttttttgttttttttttgtgttatttttaggttatgtaggaaaatgggaaattatgttggatttaatgttaaaaaagttagattttttgttttttttatttattttgttgttgttagttgagataggattttattggagtatagtggtatgattttggtttattgtagttttgattttttggtttcggtaatttttttattttagttttttaaatagttgggattataggcgtttggttaatttttttattttttgtagagataagagttttgttatgttgtttaggttagttttaaatttttgggtttaagcgatttatttgtttcggttttttatatttgtattttttaaagtatatttttaagtttagatgaatttaagtttttgtagttagaaattggtagaattggtgtttgaaattttttattttttagtgtttaaattttttattattgtaagatattttttgtgtgggttttttttgtggaaattatatttggagatttttattttttaattttaagtttttttatgatatttatttaggattagttttgtttttttgttgaaggttttaagagatttgttttttttttttcggtagttgttagtatttttattattttatgagtttttttttaagtttggttgtgaaatgtgatatttattagttttcgtagtattttttttttaatttttttgttatatttgatgataattttttaggttttttatatttttaggattttgttattaattattatagggataagtaaaagtaatatatataaaataattgtataatagaataatatagggtagttatatagaatgatttttgttgtttaattttggaaaatgtgattttcgaggatttatattttaatttttgttttttatttttgaggatggagttatcgttttttttttttggttatatatttagatgtattttaggtttgatgatagttgtaatgtaaaaaagaatagtaaggtttttggtttttgtagataatttggattagataatttttagattgggtaatattcggtttattagtgttattggatgggaagttttgattgagttgtttgggtttttggcgtgttgaataaagaattgaataaaacgtagaaataaagtaataaaagaagtaacgaaagataaaataataaaagaacgaagtaataaaagtataaatttattgaagcgaattaagtgttttaagagttttaattgtagtgtttttaagggttattaggttaaaagaatttggtaaatttttaggtgttttttatagtcgtttaattggttgtattttatgaaggattggtttgcgattaattagaggttgaaatggagatggtcgaggataattagaggcgatgtggaaatttttgttttgtaattataggagtgaaggtgtggtttgtatgttgtttagttttgtttagaaattgttgtatttgttgtttttttgtttatgttttaatttttggttattttaattttttatttttttgttttattaggtttttattttgattaaaaatgtatttatttagttgggataaattttatattgtatttgttttatttagatgagtattttagtagagtatatggtatatgagtaggtatttaaaaatttaatatatagtatattttgttatttatgtgttaggtgtcgggtaggttgagttaatagttgaatagaaatttatttatttaacgtgttaatttttatatagtatggtcgtgtatttaaattaaatggaaagcggtatgggagatttggaaaggttttttgtgggtggtatttgattatttaaatttttattttagttttatttattgattttgatatttggaataagtagttttttagtgtttgtttttttattggtaggtaaatgggttaatgacggtatttttggtattagatttcgttaattaatgaaaagtatatagaagaaaatagtttggttttttaagtgggtagtgcgatttttaaggacggtatttcgtttgatagtttttttttaggttgagaagttagagtaaatttatttgatttttttattatatagtgttttttttttagatgagtttaaagttttaagtttatttagttttgtttagacgcgtttgtttatttttaataggtttattagagaggcgggttttttaaagtttggtacggtttattgtaggtgacgttttttgttttttagcgtttttaggtttttggggtttattttttttttttattcgatttcggaattttttttcgcgttttgttcgggcgtttggttgtttggggtagaggtttttcgttatacgcgcggtttcgtttcggtttttacgtgatttggcgtgcggagcgcgtacgcgggaattcgcgttggaggcgggcgagggtcgaggggtagttagggagcgcggtttgaggagggcggggtcgtttcgtaggttcgttagtgtttttagttgttttcgcgcgttaaagttaaatttcgatattcgtcggcgggtcggtgagtttattagttgattcggtaggttaggatttggtttagcggcgtcgcgagttttagtgcgcgtattcgtggtcgttttttagttttttttgtcggacgagttttgggtcgttataagattaaggaatggttatttcgtttaagagaagttgttcgttttttttagttagttttgaggggattcgtattaagaaaatttttatcgaagggaatatcggtaaggagttttcggaaatgtgggacgtaaggttggggtgtcgcggtagtggttgaagttttttttcgtcgtatttttttgtagtaattcggtgagggttttttttttagtttggcggtgtggacgcggtttcggtttttttttttatttagagtattttttttttatttttcgttttacggggtgattgcggttttcggggttagattgggcgttaggtttgcggtttttgtgaggcgcgttttgaatttttgttttttttttgttgggaattcgtaaagggaagcgggggaagggtattagattttttgaggtgtaatttatattaaatttattttttttaggtgtatttttttatgaggtttgataaatattatgttttttgttattattatgatcgagatatagaatatttttattattttagaaagtttttatttgtttttttgtatttagttttttttattttttttattttttggtatttattgatttgatttttatttttgtaagtgttgttttttttagaatgttatataaatggaattataggttatatcgttttttgtgtttggcgttttttatttagtataatgtttttgaaatttatttatgttatttgtgtttgtagtttgtttttttttattgttgagtagtattttattgtatggatgtattatcgtttatttattttttagttgtggattttagggttgtttatagttttttagttatattattagcgaagtattgttttagttatattattaacgaaattcgaaatattcgagtataagtaaagaggtttttaatgattttaatagtatggagttttttattttttattttatatttaagtaaatattggattatgatttaaagattattaacgtttttgttaatttagatggggggtagattaggttatgtttgttattttgtaagatatatattaacgttcgatttttttgtatttttaattataggaaatttatttttgaaattttttgttttgatagatttaaaaaaaaatttttttagttttaggttgggtgttggttatttatgtatatagtaaattttttaaaatttttattatatttaaagtattgtatttttttgaaaaaggttaggtaagtagatgttttaagtatttaaatgaatagaaaaattgtatttttaaagaggattttttattttattgttttagaattaaagtattagtagaaagattatatgatataattagtaatgtaagttatttgagggtgtatgtttattagtatggaatttttgatagttgtttattgaataaagaagattatatataaagataggagaaagtggttgaataaagttatttgaaaagtaaatttgaggtagggtatggaggtttatatttgtaattttaggatttggggaggtttaggtaagaggattatttgagtttaggagttttagattagtttgggtaatatagtgagaatttatttttataaaaaaattaaaaaattagttgtatgtgttggtgtgtttttagttatttaggaggttgaggtaggaggattgtttgagtttaaagattaaggttatagtgagttatgattatattattgtattttagtttgggtgatagagtaagattttgttaaaaatatagaaataaaatagtaaagttgaatgaataatttttcggattaatattataatatatttattttttttttttttttttaatttagttaggtagtattatatttagaaatatttttttaaagtatttttaatttttttagtagttgaaataattttttaatatattattttatttttagttttttttaattatttttgtaacggtttttttgtatgtaaatgttatgtgttattttttgtttaaaattttttattgattttgtttttatttatattgaaagtagttgtgaattgatagtttgtaattgtataatattggtttgtataggttgaaaaaaaattttattggttagtggtttaagtttgtaattttagtgttttgggaggttgaggtaggaggattgtttgaggttaggagtttgagattagtatggtaatatagtgagaattagtttttaagaaaaataaaaataaaattaggttaggtatagtggattacgtttgtagttttaattatttaggcggttgatgttgatgtgggaggattatttgaatgtgggaggtagaagttgtagtgagttgagatggtattattgtattttagtttgggtgatagagttttaaaaaaaaaaaaaaagttagttgtgttagtatgtacgtttagttttagttatttaggaggttgaggtggagatttttgagatttatagtttgaggttgtcgtgagttgtggttgtgttattgttttatagtttgggttatagagtgagattttgtgtttaaagaaaaaaaaattaaatttgttgttaattcgaaaacgttttgagattttttataaataattagatttttggttttttttgaaaaatttgaagatttgttaatatcgggtttgtatttttgtatgataataattggtgtttagatggagtatgttttttgttatttttcgtttttttgatattgagattttgttagttattgtttattattggttttgtatttttgtttatgttttttttattttatttgttagatttaaataagttgtaaatgtataaattgttaagttgtgcgtaaattattttgtaatttttttattttttttagaatttgaattttatttggtcgttttagttttatatttatataatttatttttttatgttttgtgttatttaaatgtttttttatgttagattgatggaggatttatttgttttttattttaatagtttgtttagaatgatttttagtattataatgtttgtttggtattaggaattttgttagtttttatgattttttaaagtattaatattagtgtttttggtttttgtttttttttgtttttatagaaaattaatttattaattagtttattttttagtttttattttgttttaataagttaaggaattagatgtgttagtgtgattgggaattttagttgttattattttgtttgaattaaatgtaattgttattatttttagattttttaagtatgattatatgaatttttttgtttgtaagtagtgttagaagaaagttgaatgttgtagttttaagtgtttttagattttggtggatgtttaatttttttatttgttttttgggtgttatttttgaatattatgttttttttttttttttttatttagtttagtgaatgtggggtgttttttttatatgtttttatttttatttaatatttttttaaatgttgtatagtttttaagtttatattttttatattaaattttggtggttagtgtttttattatgattaaattttattgttatttagtttatcgttaaaagtttttttttttttttttggatatagtttattttgtgttttttttttaaattgtttatttgtgttattttttttattgtttcgtttttgttttttttttgtgtgtaattttttaaagtttttttaggtttttttttttttttattgttttgtttaatgttttagatttaaatatagttttgtaagttaaaggtaagttttttttattttttatggatttaatttataaggaagaggaagttttgtttgtaagtatattgaagttatttatatgtttatttgtgtgtgtgtgtacgtatatatagggaaagagagagaatattatgttaattagagatgtttaatataattatatttggtgattttagatataaagggtgtggtggttattaggagtattatttttaggttaagattgtttttattattaaatataatatattgttaaattaaacgtaataaaaaataaatgtgtttaatgaaattgggtagggagtttttttatttttttttaaagaaatatgaagagaaagtttagaaagttgaatgttttgggttttttatgttgtttgttattgtaaattttgtaaaagttaatgattatttgatattttttttttttgataattttttttttttaattttatttttttttataatagt

SEQ ID NO: 34 - DNA, 9293 bp, Artificial Sequence
  chemically treated genomic DNA (Homo sapiens)
gttgttgtgaggaaagataaaattgaggaagaaaagttgttaggaaaaaaagatgttaagtagttattagtttttgtaagatttataatagtaagtaatataaaaagtttaaaatatttaattttttaaattttttttttatatttttttagaagaaaatgaaaaggttttttgtttaattttattaagtatatttgttttttattacgtttagtttaataatatattatatttaatagtagggatagttttgatttagaagtaatatttttaatggttattatattttttatatttgaagttattaaatgtggttgtattagatatttttggttagtataatgttttttttttttttttgtgtgtgcgtgtatatatatatagatgaatatataaataattttaatatatttataagtaaagtttttttttttttataaattagatttatggggagtagaaagaatttatttttgatttgtagaattatatttaaatttaggatattagatagggtaatagaaaagaagaaaaatttggaagaattttaaagaattatatatagagaaaaaataggagcgaggtagtaaagaaggtgatataggtagatagtttagaagaaaaatataaagtaaattgtatttagaggagaggagaaaaatttttaacgataaattggataatagtgagatttaattatggtaaaaatattggttattaaaatttagtatggagagtgtaagtttagggattgtatagtatttagaagaatgttaagtggaagtgaaagtatatagaaagaatattttatatttattgagttagatggaagagggaaaggagaatatgatgtttagaaatagtatttaaggaataaataaaaaaattaggtatttattagagtttgaaagtatttaaggttatagtatttaatttttttttgatattgtttataagtagaaaaatttatatggttatatttaaaaagtttaagagtaataatagttatatttagtttaagtagagtaataatagttagagtttttaattatattaatatatttagttttttaatttattggggtaaagtgggagttagaaaataagttaattaataaattaattttttatgaaggtaaaggagaataagaattaaagatattgatgttaatattttaaaaagttatggaaattaatagaatttttaatgttaagtaggtattataatgttgaaagttattttgaatagattattaagatgagaagtaggtaagttttttattaatttaatataagggaatatttgagtaatatagaatataagaagatgggttatataaatataaaattaaaacgattaagtaaagtttaaattttaggaaaaatagaggaattgtaaaatagtttacgtatagtttaataatttgtgtatttatagtttatttggatttggtaaataaggtgaaggagatatgaataaaagtgtaagattaataatgaatagtaattaataaagttttagtgttagggagacgaaaaatggtaaggaatatgttttatttaaatattaattgttgttatatagaaatgtaggttcggtgttaatagatttttagattttttaaaagaagttaagaatttaattgtttatgggaaattttaaaacgttttcgagttagtaataaatttaatttttttttttttagatatagggttttattttgtagtttaggttgtagggtagtggtataattatagtttacggtagttttaaattataggttttaaagatttttattttagttttttgagtagttaggattaaacgtgtatgttaatataattggttttttttttttttttgagattttgttatttaggttggggtgtagtggtgttattttagtttattgtaatttttgttttttatatttaagtgatttttttatattagtattagtcgtttgagtagttggagttataggcgtgatttattgtgtttggtttaattttatttttattttttttagagattagtttttattatgttgttatgttagttttaaatttttggttttaagtaatttttttgttttagttttttaaagtattgggattataagtttgagttattggttagtaaaatttttttttaatttgtgtaggttaatattgtgtaattgtaggttattagtttataattatttttagtgtaggtaaaggtaaaattagtgaagaattttaagtaggggataatatatgatatttgtatataaaaagatcgttgtagaagtagttaagagaaattggagatgggatgatatattaggaaattattttagttgttgaaaagattaaagatgttttgaggaaatatttttaaatatgatgttatttaattggattggagagagggaaaggggatgaatgtattgtggtattgattcgaggggttatttatttaattttattgttttgtttttgtgtttttaatagagttttgttttgttatttaggttagagtgtagtagtgtgattatggtttattgtggttttgatttttgggtttaagtaatttttttgttttagttttttgagtagttggaggtatattaatatatgtaattaattttttaatttttttgtggagatgagtttttattatgttgtttaggttgatttggaatttttggatttaagtgatttttttgtttaagtttttttaaattttgggattataagtatgagtttttatgttttgttttaaatttattttttagatggttttgtttagttatttttttttgtttttatatatggttttttttatttagtaagtagttgttagagattttatattagtaaatatgtatttttaaataatttatattgttaattatattatatggtttttttattggtgttttaattttggagtaatgaaataagaagttttttttgagaatgtagtttttttatttatttgaatgtttaaagtatttgtttgtttggttttttttaagaaggtatagtgttttgaatgtggtaagaattttaaaaaatttgttgtatgtatgaatgattagtatttaatttggagttaaaaaaatttttttttaaatttattaaaataggaagttttaggggtaggttttttgtggttggagatatagaagaatcggacgttggtgtgtattttgtaaagtgataggtatggtttagtttgttttttatttgagttaatagaaacgttagtggtttttgaattataatttaatgtttatttggatgtggagtaaggggtgaggaattttatgttattaagattattaaagatttttttgtttgtattcgaatgtttcgagtttcgttaataatatagttaaaataatgtttcgttaataatatagttaaaaaattgtaaataattttgaggtttataattagaaaatggataaacgatggtatatttatgtaatggaatattatttagtaataaaaagaaataaattatagatataagtaatatgaatgaattttaaaagtattatgttaaatgaaagacgttagatataaaaggcgatatagtttatgattttatttatatggtattttggaaaaggtaatatttgtagggatagaaattaaattagtgggtgttagggaataggaagggtggagggggttgaatataaaggagtaggtaggaattttttaaggtgatgaaaatgttttgtatttcgattatggtgatagtaaaaggtataatgtttgttaaattttatagaagagtatatttaaaaagggtgaatttaatgtaagttatattttaagaaatttaatatttttttttcgtttttttttgcgagtttttaataaagagggagtagaggtttaaagcgcgttttatagagatcgtaggtttggcgtttagtttgatttcggggatcgtagttatttcgtggagcgggaggtaagggaaggatgttttgggtgggaaaggaagtcgaggtcgcgtttatatcgttaggttggagggaaagtttttatcgagttgttgtagagagatgcggcgaagggaagttttagttattgtcgcgatattttagttttgcgttttatattttcggaggttttttatcgatgtttttttcgatggagatttttttgatgcgggtttttttagagttggttgagaaagacgggtagttttttttgggcggggtggttattttttagttttgtggcggtttagagttcgttcggtaaagagggttgggaggcggttacgggtgcgcgtattggagttcgcggcgtcgttaagttagattttgatttgtcgggttagttagtgagtttatcggttcgtcggcgggtgtcggggtttgattttggcgcgcggaggtagttgaggatattggcgggtttgcggggcggtttcgttttttttaagtcgcgttttttagttgtttttcggttttcgttcgtttttagcgcgggttttcgcgtgcgcgtttcgtacgttaggttacgtgaaggtcggggcggggtcgcgcgtgtggcggaaggtttttattttaagtagttaggcgttcgggtagggcgcgggaagaggtttcggagtcgggtggggaggaagggtggattttagaggtttgagggcgttggagggtagagggcgttatttgtagtgggtcgtgttaggttttggaaaattcgtttttttagtgggtttgttggagatgaatagacgcgtttggatagaattggatagatttaaagttttgaatttatttggggagaaggtattgtgtggtaggaaaattaaatggatttattttggttttttagtttagaggaagattattaggcgaagtgtcgtttttgggaatcgtattgtttatttagagagttaggttgtttttttttatgtgttttttattaattaacgaagtttagtgttagaaatatcgttattagtttatttatttgttagtgggaaaataggtattgagaggttgtttgttttaagtgttaaagttagtaagtgaaattgggatgggaatttaggtagttagatgttatttataggaggtttttttagattttttatatcgttttttatttgatttggatgtacgattatgttgtatagaagttagtacgttgggtaggtaggtttttgtttagttgttaatttagtttgttcgatatttggtatataggtaataaaatgtattgtatgttgaatttttgaatgtttatttatgtgttatgtattttgttagaatatttatttagatgggataaatgtagtgtaggatttgttttagttagatgagtgtatttttagttagggtaaagatttaatgaggtaagagaatagggaattagggtaattaagggttaaggtataagtaaaagaatagtaggtgtagtaatttttaggtaagattaggtagtatataggttatatttttatttttgtgattataagatagaagtttttatatcgtttttgattgttttcggttatttttattttagtttttgattggtcgtaggttaattttttatagggtgtaattaattggacgattgtaaagggtatttagggatttattaaatttttttagtttagtaatttttaagaatattgtaattgggatttttgaagtatttggttcgttttaataaatttgtgtttttgttatttcgtttttttgttgttttgtttttcgttgttttttttgttgttttgtttttacgttttgtttaattttttgtttaatacgttaaaaatttagataatttagttaagattttttatttagtaatattaataaatcggatattatttagtttggaagttatttggtttaaattgtttatagaaattaaaggttttgttatttttttttatattgtaattattattagatttgaaatgtatttaaatgtgtagttagaaggggaaaacggtgattttatttttagaaataaagagtagaaattaaaatgtgaattttcggggattatattttttaggattaaatagtaagaattattttatgtaattgttttatattattttgttatgtaattattttgtatatattatttttatttatttttatagtgattaatagtaagattttaggaatataagaggtttgaagagttgttattaggtatagtaaggaagttgggagaaaggtgttgcggaagttaataggtattatattttatagttaagtttgggggaaaatttatgaaatggtaagagtattggtagttatcgagaggaggaaggtaagttttttgagatttttaataggaaagtagagttggttttggatggatgttataaagaggtttggggttaaggagtagaaatttttaagtgtggtttttataaaaaagatttatataagaagtattttataatgatgaagagtttaagtattggaaaatgaaagattttaaatattagttttattagtttttggttgtaaaaatttgaatttatttgagtttaagagtatattttgaaaaatataaatgtgggaggtcgaggtaggtgaatcgtttgagtttaggagtttgagattagtttgggtaatatggtaaaatttttgtttttataaaaaatagaaaaattagttaggcgtttgtagttttaattatttgggaggttgaggtgggagaattatcgaagttagggagttaaggttgtagtgagttaagattatgttattgtattttagtgagattttgttttaattaataataataaagtaaatgggggaagtaaagaatttagtttttttggtattaagtttagtataattttttatttttttatatgatttgggggtaatataaggagagaatagagaaaagtattttttaaaatattttgatttttggtttataattttttatttaaaattttggtagttagatgttttagaatttaaaatttttagaaaagatttttagaaaagaaattttaaattttggaattggttggacgtagtggtttttgtttataattttagtattttgggaggtattttggaatgtttgagtttaggaattcgagattaattagggaaatatggcgaaattaatagaaaaaatataaaaattagttggttgtggtggtatatatttgtggttttagttatttaggaggttgaggtgggaggatggtttgggtttgtaaagttttagttttagtaagttatgatcgcgttattgtatgttagtttgagtgatatagtagtaagatttcgttttaataataaaatttggaatcgaaattttagaaacgatatagtgtatatattgtatattaattattaagtaagtatttttattttttttgtagaggtgttaaattaaatgtattaatattttgtagtgaaataaagagtgttaatatgaagtgggataaagattattaatatttggttagaataagtttgtattgaatttaaaaaaaatatttttggggttaagtacggtggtttacgtttgtaattttaatattgtgggaggtcgagatggatagattatttgagtttaggagttcgagattaatttggttaatatggcgaaattttgtttttattaaagatataaaaattagtcgggcgtggtggtgtgtgtttgtggttttagttattcgggaggttgaagttggagaatcgtttgtattcgggaggcggaagttgtattaagttaagattatgttattgtattttagtttggatgagagtgagatttcgttttaaaaaaataaataaaaaaattttggttttttgagttttttaggttttgaaattgtagataagagataggatatagcgtatttagttagttatgatcgtgttgttatttaatttttttttattagaaattttattatttttttaatttgggaatttttttttgtgggaattttagtgtaattaaagaatgagatagcgttttgattgataatatataggtttattaggaaaattaaattaatttagaaaataataaaaagtagaaaaaataagagattttgaatattaagtagtggttatatagtttatgagtttgtttatataaatttaattatttttgtaaaatgatatttattaatttaataagtttggttataaatttttttttgtaatttttattagtgtttagaaaacggggtatagaagttattataaatgtaagagtgggagttagtgtgttttttgtaaatttgaaatttgaaagtaaaataatatattagaagagtataggagttattagatgtatatagtttagtaaagaaagttgttttattatatgtttgtgaagtggattgaggttattaagaaaatgtgatattgtatttattatgttgtaataggagtatgtataatttattagtaaaatttttattaaatatggttgttttaattttagaggaataattaattagaatttgtgtgttgtaaaatgtttattgtagatgttatataagggattaataatttataatatatttagtataatagaggtaaatgtatttaattattaaaatgtaggtaattttataatatatatttttttatatataataaatgaataatagagtgtttttatttttttattttttgagacggagttttgttttgtcgtttaggttggagtgtagtggtatagttcgtttttcggatttaagtaattttcgtgttatagtttttagagtaattgggataataggtaagcgttatcgtgttcggttaattttttaatgtattttttagtagagatggggtttttttatattggttaggtaggttttaatttttgagttcgtgattcgtttatttcggtttttttaagtgttgggattataggcgtgagttatcgcgttcggtttatagggcgtttttaaagtatgtagatatagtttataatagtattggttagtattttaattagttttttttttaaatattattagtgattttgagtaattgtggttattattattaaatatttttaatttgaagatttaaatatagaataagatttagttttaaaaaaaaaaaaaaggtgttaagaaatataatgtgaaaagagtagttttttaaataaaggtgttgggaaaaatggatttttatatgtaggagaatgaaattggatttattttatattatatataaaaattaatttaaaatggattaaagatttaaatttaaggtttgaaattataaaattttaagaagaaaatataggga

SEQ ID NO: 35 - DNA, 5227 bp, Artificial Sequence
  chemically treated genomic DNA (Homo sapiens)
ttgttttgtttcgttttaaaggtttttcgggtagtgtgttgggatttgattcgtttttttaggttaatatgttataatacgattttagtttgttaagttatatgatttttgtttgttattgataatttggtttgtttttaggttaggggagattatttggtttattttttatattatttttatttttagagaggaaatggaggtgtggagtagcggagtagtttaattaaagatttgttattgttatattattttagttataatcggttttgtgatagtttttatttaaattttggttgtttttatgagggtatgataggatatgtaataggttattatatggtttttgtttttaaggtataagaaaaatattttgtattttgggtggtgcgttttatttttggttaagttgtttttaagtttatggtttttattttatttttataatttttatttttaatttataaataaggacggtaagattttttggtaagtgatggggagttgagtttaaaatcgcggtttcggtttttttagtttagggtagttttgcgttgaagtgtatttatacgtttcgggatgagatttcgttgtaaatttcgattcgaatatttaggaggtaggtttgtgtcgcgttttttatatagggagttataggatttgttgtttggtatagtaagagagggttttggagaaagttataggagtatcgtgggggaaaataggtggttaaatagaatcgggtttattgggtaaaatatatgatttttggtaggttgagggtttattaattataaggtaaaagttaagggcgttgttttgagagaagcggaaaatgattattaagggattttagtatttcggttttttttgggagatttacggggttagaataggagattattttcgtttttttgtttgtttgttttgttttttgtttttggtgaaacgtagtttcgttttgttatttaggttggagtgtagtggcgcgatttcggttattgtaatattcgtttttagggtttaagcgatttttttgtttttgtttttagagtagttgggattataggcgcgtattattatattcggttaatttttgtatttttagtagagacggggttttattatgttggttaggttgatttcgaatttttgattttaagtgattcgttttttttagttttttaaagtgttgggattataggcgtaagttattgagttcggttaggagatttttttaagaagattcgagatgtcgataattttagtggatggatattaattttaaaaagaaaagtttaaaaggtttatgtgtttattagttgggaggggttaagaaatatgggagttttttatagtgggggtaaaacggcgggtaaagttaggtgggcggaatagtagtttttgggggagataagcggtaaagaggtttacgatcgattaggggcgattaaggttgatagtcgttggggtcgttgggcgtcgggagttggcgtttcgttttttttttttttttttatttttcgtattttttattattttcggtgttttttgcgcgtgcgcgtgtagatatcggttgttaaatattgtattattttcgttttttttttttttttttttttttcgttatattttttttcgcgcgcgcgtatgatttatttatttttttcgtgaagtttcgtgatttaaagttattttcgggttcgatattacgtcgattttttagcgagagggagcgacgggggcggtgtcgcggggtttttgagtggcggatgcgagggacggggcggggttaatgtcggcgtgttattttttgattggtaggttttggggtttcgtttttgagaggagggtaaggttatggtaaaagattatagttaggcgttttcgaggttagagatttaagtttaaggtattgagcgtattatgttaaagatgagcgggtggtagcgatagagttaaaattagagttggaatttgaggagagaggcgagtattgatttttatttattttttattttttcgtttttttaaagttggggcgttcgttttttaggatcggttttatttttttatagtgaagttagggatcgttcgagagaggaatggggagagttttttattttggggtggtgtttataaatttttattgtttcggacgacggcgtttttttatttttgttcggagtcggaatacgggttttgttttgtgttgttgggtaaagggatttcggttgtttttgggaaatttattttttttcgtagttaattttaggttttatcgttaggtttgttcgcggggaggtaggttagtaggatatattttcgttttaagattgggtgattatcgtttaggtcgttttcgtcgtttcgttattagcgggttttttttttattttatttttaattttgttttagttttagtgtttttggtgttagtatggttattttggtagttggggttattggattttgtagcggataggggaattttgaggagatataagtttttgggaggggtgtcgatggatagggagtggtgtgttttttttttgtcgtagaggtttttgggttttttgtataagagagtagtttggattttttaagtgtaggaggttatttggggtttttttagggtattgtttttttttcgggattagtttttgtttttttaattcggttttgttttttagttaatttttgtgtaattattgtattaggttagtttcgtttggttttgtagttttttgatttgaggttttattgttgatgaaagttaagttttatatattggaaggtaagggagggttttttagggaggatagttttgtagagaaatatttcgggtaatattgtatttttagtttttagggattagtagttgttattttgtttttgttttttttttataagagagattggggggagtttatttatttatttttaataaatatttaatgaggatttattgtgtgttatatagtttggggtttagggtatatttttgagtaagaggaaaaaattattttagtgggaggtttatagtaaataaaatataagtgttacggagaaagttaaagtagagaaaggaatggagaatgtttaggatggaggttagagtgttatattaggtggttaggaattattttaggtaatttttttatttaaaattttttagtgatttttatgatatgaaataggaagttattggagggtttgagtagaggaatgatttgttttaaaaggtttatttaggttgttgtatggtgaatagagttgcggaggggtggtaagagaagaaatgggaagattttttgtagttagaaagtttttgtagtaatttagagatggtagtgaattgatttagattggaaataatggaattagaagtgtttagatttttttaagtaaaggttttaaaaatttatttttaaagaatgagttaagggtcgggtatggtggtttatatttgtaattttagtattttgggagattagaggtgggtggattatttgaggttaggagtttaagattagtttggttaatatggtgaaattttatttttattaaaaatataaaaattagtcgggtatggtagtgtatgtttgtaattttagttatttcggaggttgaagtaggagaatcgtttgaatttagtaggcggaggttgtagtgagtcgattgcgttattgttttttagtttgggtaaaaagagtgagattcgttttagaaaaaaaggaatgagttaaaatttgttagtattttggattgtagggtgtgagagaagaggaatgaaggatgatattaaggtttttagtttaagtaattagagttgttatttgagatggggatgattttggaaggggaaaattagtaagagtttgtttttgtatatagttttaggtgtttattagatattgaaaaagaaatggtaagtaggtagtagatagtagagtttgaagttttggaagaggtttagattggaaatgtatatttggaggatgttagttttgtgggaatggagttaggaaaatgttatgatttgtttttttttttgtagtttagtttttattttggtagatttgaggtttgttttggatttagagaaagttgagttggttaggattttattattatgtaattaggattataaatgttagtaattaaaaataaagaaagttaggtttttttttgtttttcgaaatggttatagggattaagtatgtatattttataagattagaagtaaggaaggattagtaggaggttggaggtaaaagaaaaataagggtttagtacggtagtttatgtttataattttagtattttgggaagcgatggattataaggttaagagatggagattattttggttaatatagtgaaattttatttttgttaaaaatataaaaattagttgggcgtggtggtacgcgtttgtagttttagttattcgggaggtcgaggtagaagaattatttgaatcgaggaggtagaggttgtagtgagtcgagatcgtattattgtattttagtttggtaatagagtaagatttggttttaaaaaaaaaaaaagaaagaaaaaaagaaaaagaaaagtaagttgttttttttttttttaaaaatggttgatatttttttttgttgtttatagtgtttaagaaggaagtgtatttttatatattattatatttgaaagtaggtaaatttaatttatttttttttaaaaattttaaacggtaggatagtaaatattttagatgttaaaagttttatagtttttagcgtgattttttatttttgttattgtagtattaaagtagttataaataatatgtaaataaatagatgtggttgtattttagtataattttatttataaaaataggtattagattagtttgttaatttgtggtatagattgtttgttatatggagtttgttttagttattttttattattttgtagatgtgtttttttagattgatttaattgtagagatggtagttgagttattgtttttttttttcgggatattgtttagttgggagttggaagtttggtatgaggatttgtaagaggttttgtttttagatgaaaatgggggtatttatgttttattttttggaaatgaagaggtaagaatgttagttttaaagttaaagggggatgttatttttttttttttaattaatatttatgttttttttttttatttttttgaagg

SEQ ID NO: 36 - DNA, 5227 bp, Artificial Sequence
  chemically treated genomic DNA (Homo sapiens)
tttttaaggaaatgaggaaagggaatatagatattagttgagaagggaaaggtaatatttttttttagttttagggttaatatttttatttttttatttttaggaggtgaaatataggtatttttatttttatttgaagataggattttttgtaggtttttatattaggtttttagtttttagttggatagtgtttcgaaggagaaaggtaatgatttagttgttatttttgtagttggattagtttggaaaagtatatttgtaggataatggggagtggttggaataagttttatgtagtaaatagtttatgttataagttggtaagttggtttgatgtttgtttttgtaggtaaagttgtattggaatatagttatatttgtttatttatatattgtttatggttgttttggtgttatagtggtagagatgaagagttacgttagagattataggatttttaatatttaaaatatttattgttttgtcgtttaaaatttttggaaaagggtaggttaagtttatttgtttttaggtgtggtgatgtatgaagatatattttttttttgaatattgtgggtaataaagagaaatgttagttatttttggaagggggagaggtaatttatttttttttttttttttttttttttttttttttttttgagattaagttttgttttgttgttaggttgaagtgtagtggtgcgatttcggtttattgtaatttttgttttttcggtttaagtgatttttttgtttcggtttttcgagtagttgggattataggcgcgtgttattacgtttagttaatttttgtgtttttagtagagatagggttttattatgttggttaggatggtttttattttttaattttgtgatttatcgttttttaaagtgttgggattataggtatgagttatcgtgttgggtttttattttttttttatttttagttttttattggtttttttttatttttggttttgtggggtatgtatatttggtttttgtagttatttcgaagggtagaagagggtttgattttttttatttttagttgttgatatttgtagttttggttatataatagtaaagttttggttaatttagttttttttaaatttaaagtaggttttaaatttgttagggtaaaaattaaattatagggaagggaataaattatagtatttttttaattttatttttatagggttgatattttttaaatgtatatttttagtttggattttttttagaattttagattttgttgtttattgtttatttgttattttttttttaatgtttaataggtatttaagattatgtgtaaaggtaaatttttgttgattttttttttttaaggttatttttattttagatgataattttagttgtttaagttaaaaattttggtattattttttatttttttttttttatattttgtaatttaaagtattagtaaattttaatttatttttttttttttgagacgggttttattttttttgtttaggttggaaggtagtggcgtaatcggtttattgtaattttcgtttgttgggtttaagcgatttttttgttttagttttcggagtagttgggattataggtatgtattgttatgttcggttaatttttgtatttttagtaaagatgggattttattatgttggttaggttggttttgaatttttgattttaggtgatttatttatttttggttttttaaagtgttgggattataggtgtgagttattatgttcggtttttaatttattttttaaaaatgagtttttaaaatttttgtttagaagaatttaaatatttttaattttattgtttttaatttagattaatttattattatttttaaattattgtagaaattttttgattgtagaaggtttttttatttttttttttgttattttttcgtaattttatttattatatagtagtttgagtgagttttttaaaataggttatttttttgtttaaattttttaatgattttttattttatgttatggaagttattgaagggttttgagtggaggaattatttaaggtaatttttgattatttgatgtaatattttgatttttattttgaatattttttatttttttttttgttttagtttttttcgtggtatttatattttgtttattgtaggttttttattgagatgattttttttttttgtttaaggatgtattttgagttttaaattgtgtggtatatagtaggtttttattaagtatttgttaagaatgaatggataaattttttttagttttttttatagggaaggggtagaagtagagtggtagttgttgatttttaggggttagagatgtaatattgttcgaagtatttttttgtagggttgttttttttggggaatttttttttgttttttagtgtgtgggatttggtttttattagtagtagagttttaggttagaaggttgtagagttaaacggggttggtttgatgtaatggttatatagagattagttgggagataggatcgggttaaagaggtagggattaatttcgagggaaggataatattttggggagattttaaatggttttttatatttaagagatttaggttgtttttttgtgtaggaggtttagagatttttacggtaaaaggaaaatatattattttttgtttatcggtattttttttaaaggtttgtgtttttttaaggtttttttattcgttgtagggtttagtagttttagttattaaggtggttatgttgatattagaggtattgagattgagatagaattgggggtggggtagggagaaggttcgttggtggcgaagcggcggaaacggtttgagcgatggttatttagttttagagcgggggtgtgttttgttgatttgttttttcgcggataggtttaacgatgaggtttgaagttggttacgggaaagaatgaattttttaagggtaatcgaggtttttttgtttagtagtatagagtagggttcgtgtttcggtttcgggtaggggtggagagacgtcgtcgttcgaagtaataggggtttgtaagtattattttagaataagggattttttttatttttttttcggacggtttttaattttattgtggaggagtgaggtcgattttaaagagcggacgttttaattttgaggagacgggagggtaaaaggtagatgggaattagtattcgtttttttttttaggttttagttttgattttggttttgtcgttgttattcgtttatttttaatatgatacgtttagtgttttagatttaagtttttgatttcgggagcgtttggttgtaattttttattatggttttgttttttttttaggggcgggattttaaaatttattaattagaaagtggtacgtcggtattggtttcgtttcgtttttcgtattcgttatttaggagtttcgcggtatcgttttcgtcgttttttttcgttagggggtcgacgtagtgtcggattcggaagtggttttgggttacgaggttttacggaggaggtgggtgagttatgcgcgcgcgcggaggggagtgtagcggggggggaggggaggaaaggggggcggggatgatgtaatgtttggtaatcggtgtttgtacgcgtacgcgtaggggatatcgagggtggtgggaggtgcggagggtgggggagaggagagagggcggggcgttagttttcggcgtttaacggttttaacggttattagttttggtcgtttttagtcggtcgtgagtttttttgtcgtttgttttttttagaagttgttgtttcgtttatttagttttattcgtcgttttatttttattataagggatttttatattttttggttttttttagttaatgggtatataggttttttgaatttttttttttaaagttggtatttatttattgggattgtcgatatttcgagtttttttaaagaggttttttggtcgggtttagtggtttacgtttgtaattttagtattttgggaggttgaggagagcggattatttgaggttaggagttcgagattagtttgattaatatggtgaaatttcgtttttattaaaaatataaaaattagtcgggtgtggtgatgcgcgtttgtaattttagttattttggaggtagaggtagaagaatcgtttgaattttggaggcggatgttgtagtgatcgagatcgcgttattgtattttagtttgggtgatagagcgagattacgttttattaaaaataaaaaataaaataaataaataaaaaaacgggggtggttttttgttttagtttcgtaaattttttaaaaggggtcgaggtattggaattttttggtagttatttttcgttttttttagaatagcgtttttgatttttattttgtagttggtaagtttttagtttgttagaagttatgtattttgtttagtggattcgattttgtttggttatttatttttttttacggtatttttatggttttttttaagatttttttttgttgtattagatagtaagttttgtgattttttgtgtgaggagcgcggtataggtttgttttttaggtgttcgggtcgagatttatagcggagttttatttcgggacgtgtgagtgtattttagcgtaggattgttttggattggggagatcggagtcgcgattttagatttaattttttattatttgttaagggattttatcgtttttgtttgtaaattaaagataaaagttgtgaaggtaaaatgagaattatgaatttggaggtaatttgattaaaagtaaaacgtattatttagaatgtaaagtattttttttgtgttttgaaaatagaggttatgtggtggtttgttatatattttgttatatttttatgggggtagttagagtttaagtagaaattgttataaggtcggttgtgattggagtggtgtggtaatgataggtttttggttaggttgtttcgttgttttatatttttattttttttttgaaaatgggggtagtgtggagggtggattagatggttttttttggtttaaagatagattaggttgttagtgataggtagaggttatgtgatttgataggttgaggtcgtgttgtgatatgttgatttggggaggcgggttaagttttagtatattattcgggaagtttttggggcggggtagggtaa

SEQ ID NO: 37 - DNA, 17848 bp, Artificial Sequence
  chemically treated genomic DNA (Homo sapiens)
  unsure (2183, 8830, 9169, 9333, 9339, 11774)
taatttaaattagtttttgataagcgagattttattagagagagagagagagaaataatgttttaggtattgagggtttaagaaggtagttattatttattatgtgttatataatgtttattgggtggtaattgtgtggtaggtgtggtaggtggatttttttttttaatttttatttttaggttattggaatttagagtttatattgttaattattttttgatacgtttttttttatgattaggtgtattaatatagtttatttaggggagtagagttattatgggtattatgggaataagggttttattataggaatgatattttttttaaagattgaaggagttggaaaagtgaaagtttgtaaggaattgtgggatattttaagaggagttataaatgggtggaggattaggtgaaatttatttgttgggtatttttgtttgttatagtatttgattagaagatttttatagaggaatggttgatatttttattttgttttttaaattttattttaggtttttttttggttaattttaatttagagttttgttggtagggcgttttggaagtgtattttttaatttaattaaatcgatttagtataatttagtatattataaaatttttaaagtaggtgagatatagttggttaaaagtttaggttgtagaataaagtttgggttatatttttgtatgtttattttttttttttaatggttgtatgatattttaaataatattggttagtattttatgtatacggtagtatttagaaatattggaaaaatagtaaattttttagagttgtattttaaggattaagtagagtgtttggtatgtagtagatgtttagtaaatattggatgaatgaatggatgttgaatgattagagtttttgtaggataatattttgtttaagataaaatcgtttaggggtaggaagtggtttcgtttttttaggtaagggggaggtaattttatttattaatatgttattatttttagttttttggttagtatttaaatgggatgaaaatttcgtgtttattgtttcgaagaggaaatgattattatttttttggggtgttttttttttttatgaagatttttttaattgtatttttttatgtgtaaaagtggggttttaatttttttttttggttatagttgattgaattatgattagatatttgaatatagttgggttaattagatttttttttttgggaatttggaattgggatttaaataaataaaaaatatttaataaaataagtatagataattaaaggggggtagaaagattattattaatgaattaagataattgataggtaatttaggtaaaagatattttagttttttatattatattttatattaaaaaaattttgaatgtttttagaggttgggtgttgtggtttatatttgtaattttagtattttgggaggtagaggtgggtggataatttgaggttaggagtttaagagtagttaggttaatatagtaaaatttcgtttttattaaaaatataaaaaattagtcgggtatggtatatgtttgtaattttagttatttgggaggttgaagtatgagaatcgtttgaatttaggagatggaggttgtagtgagttaagattgttttattgtattttagtttgggtaagagattttgttttaatataagaaaagaaaagaaaagaaaagaaaagaaaagaaaagaaaagaaaagaaaagaaaagaaaagaagtaaattatagagataaaatatttataaaggatttatttagaatatttgaagaataagataagtaaaagataattaatagaaaaatggatataagattttaatagaggatattgaaatgattaataaatatataaaaagatgtttgattttattaattagtaggaaaatgtaaattaaaattataataagttataattatatatagtaaaatggataaaatttaaaaagttgataatattaattgttggtaagaatgtgggaaaattagaatttttttttattgatgatggtaatgttaattagaataaatattgtggaattatttattatttgggaatatttattaaagttgagtatatatatgtaatttattatatagtagttttagttttatttatatatttaagagaaatgtatatttttttntattaaaagatatgtataagaatatttatcgtaatattatttattatggtttaaatttagaaattttcgagtatattgtggtatagtgatatttgtggatattatatagtaatgagaatgagtgaattataattaatatatttaatttggatgaattttatagatatgttaaataaaagaagtatttattatataattttatttatataaagaaaacgtaaaattaatttttattgttgaagttaggttaatggttatttttgagggatagtaattggtaacgaatatgggggattttggagatgcggataatgttgttttttgatttgaatttaggtaatagttattttatttgtgaaaattttattgaattgtatatttataatatatttttttttttttattgtataatatatttttttttttttattatatattatgttttattataattttttttttttttttttttttgagacggagtttcgttttgtcgtttaggttggagtatagtggcgcgatttcggtttattgtaagtttcgttttttcggtttaggttatttttttgttttagttttttgagtagttgggattataggagtttattattatatttcgtttttttttttttttttttgtttagtagagatagggttttattatgttagttaggatggttttgattttttgatttcgtgattcgttttcgttagttttttaaagtgttgggattataggcgtgagttatcgcgttaggttattttattataaaatttttaaaaataatttttaggagttttgttattggtggagggtgtttaggtttttgatattttgaataaagaattggataaaacgtataaagtaaggaaataatgaagtaataaaagtatagatttattgtatattaaagaatatttttttcggtaggaagggtttaagtaagtagtaattatagaattttttggggtttaaatattttttagaggttttttattggttatttggtgtatattttatgtaaatgaagtagtggttagcgattagtttgattggttgtaggaggggattaattagaggttgaagtaaagttatgaagttatattttatgtaattaaagatttggtttgttattagtttgattgattgttcgcggggattagttagaggtatttttaattttttatttgttatttagaagagggattagtttttggtttttttgttatttgggttagaaagttggggttttttttttgatttagttttaggaagttagtttaaatcggttttaggttttttgtttttagattttatttttttgtttcgtagtttttaggagattaatgtttgtttgtagataatttttttatttaatttttataatatttttgaggtagtaagattttggcgaggtagagagttttttaagtttttttggatgaatattttttaagtttgagtttatataggtaaagaaatgtaagtagtttttttttgttttttttttttgttttgttttgttttgttttaatagaagtggttgttggagtggagatgggaatgggtaggattttagtcgttttagtagttattaacgttttattttggttatttttaaaaaattcgattaaaaaaaaagtttttaatatataaatatgattttagttattttatatatatattaatataagaaaaaggtttcgtgttttttatgggaatagttttaagataggtattttagttttcggtttttttttagtttttttgtaattagatttttgttttttaaaatttgttatatttaagagcgttgtttgaaggtcggtttggtttgttgatttttggttttgattgttggtgatttaagcgattggaattggaagtattatttgataatattttgtaaattattatttttgaggttgttatgacgacggggtgtggtagttcggttttatttgtggtagtagtttaggtttttgtttttttgtagagtatattttatcgatagtaggatttaggttttatataagtttttattcgttattgtttacgtttaagaatttaatttattaggtttaaataatttttagttatatatttgagttattattattttattttgaagggatttttgggtataatgtaaatcgattgatcgaatatttatttatttatttaagatataaattaagagatggggtgtaattgattatttaatttgttaatttagttaataatatgttagtattgtgtaggggaattatagggaataggaaaaagttaaatttgtgtaaattattagattgagttatttttttattttaaaatttttattttttttcgatattaaaataaaaattagataataagtatttgggggggggaaatttttttttaaaattataatttttatttttaattttgtttttagttataaaatttattttaaagttatataaaaatgaagtggttggattgtggaattacgttttttaaaatgttatttgtttaatgaataaaaattattcgtatcgtaattttttttattattaaattttgtatcgttgtaaaattttttttatttaacgtttttttataaatatcgcgatagcggagcggttttttgggcgtatttcgtcgtatgtttaattttatttattttttgtttgacgatttttttacgttaacggtgcgttggagcgagtgagtagcgatatttagggcggaagtgttttcggcggaagtgatcgttgtgtgaatcgtgggtgggatggtcgcgggtcgtttttttttaagtcggtttcgagtattttttagttttatggttaagagtttattcgagggcgtttttttttttagaggtttgtacgcggggcgcgggtttcgaaggttttttatcgaaggtaatattggtaagggtcggaaagcggttgttaagttttggttttcgttacgtaggcgatagaggttgggaaaggagttgggttcggaatggtttgcgtttgatgcggtcggtttttttttttgggttgcgaggagagttttttttttcgtaaagtgtattgtgtatttttgtttttttgtttttaggatatcgggttttagtattcgtttataggaatatatttgttggggtataaaagttacgtagttagtggataggataagaattgtattagttgtttgtaatagatcgaaattgaagcgataagcgggtgtagtttatttgtttttttagatagggttgttatatttagtagaaattaaaaataatatttagttaaaatagaatttaagataacgaataatttttagtgtgtgtttaatgtaatatttgggatatttttatagtaaaataataacgaaattatttattgaaagtttaaatttaattgtgttttgtattttatttggtaattttattcgaagagagtttttaaattttagtcgtttaaatattatatttataatttttgttttgtgtttgtgttagttgtataataattttttaaggttttttttagaagaattttattttttaaatttaaaaatatgtattaaattaaaaattattttgttaaaagagtgagatttagtattttgaataaaaagtagttagaaagtaaaatgaaggtaaagtatttcgatttaatattaataaattttgatttgatatttttatttattaagttattgagtttttaaaaggggtttagtaagtgttgagtattgaagacgtagtagtaaattgagaatttttttttttatttatttaataaattattttttgagttatttttatatgttagtattgtttttggtttggagaatatagttgtgaatagaataaataaaaatttttgtttttatggaatttaagtagggagagatggataataaataatataaattaagtaaggtgaataatatgttagagagtaataagtatgatggagaaaaattagggatgaagaattgagggaagtttttattttattttatttgagatggagttttgtttttgttatttaggttggagtgtaatgatacgatttcgatttattgtaatttttgtttttttggtttaagcgatttttttgttttagtttttcgaatagttgggattaggggtattcgttattatatttagttaatttttgttttgttagtagagatagggttttattatgttggttaggttggttttaaatttttaattttaggtgattcgtttgtttcggttttttaaagtgttgggattataggcgttagttattgtatttggtcgaagttgttattttaaataaaataagtaaggttttattgagaaggtgatatttgagtaaaaaattgaagatgagggagtaaattacgtggatatttgggagaagaattttttaggtagagtgaagagtaattggaaaggttttgaggtggaaagtgtgttcggggaataggagggaaatcgttgtgattgaagtcgagtgagtaaggatgggagggaaattagggtaaaagtttaaggggtggttagattttataggttttattatgggtttttaattttatcgagatgggtagttattggaaggtttgaggagttaagtgatagttttatttagattataaaaagattattgtggttgataatattgaaagtgaagagtgttaagtggtattgtaataattatagtattgtgaaaagtgaaagtggtgagacgtgattggattttagttatacgttaataaaaattgagttatattttaagtaaaatttaatagtggaagtggtgagaaatgattgggttttagttatattttaagatagggttaattggatttggtgataggttgaatgtagagtgtaaggtaaagagaggggttaatgatgattttaattattttgatttgagtatttgaaagatagatttttgatttttttttatttttttttttttttttttttttttttttttcgtttttttttttttggtgtggttttgttttgttgttaggttagaatatagtgatgtaattgtattttattgtagtttgttttttaggtttaagttatttttttattttagttttttgagtagttggatttataggtgtttgttattatgcgtggttaattttgtatattttttgtagagatagggttttattatattttttaggttggttttgattttttgggtttaattgatttttttgttttggttttttaaagtgttgggattatagaagtgagttttggttttaagtatgttaggtttttatatgtttattaatatttaagtagaggtgttgaataggtaattggatatgtaagtttagaattagggttttttcggattggagttgtaaatgtaggtggtatttaatgttagagattatgtgttgatggaaaggattgagttttgagtatgtaaatattatgaaattggggagatgggaaggaataagtagagattgttaaggaatgtttattgaggtaggagaaaaaaataaaagagaatgatattttggaagttaagtgaagaaggtatttagtgggagggaatgattagttgtgttatattgtttaagtaaatgaaggtttttggtgaatttgaaaagaatagttttaggagtgttaggagtgaaagtttaattggtataggtttaaggagaatgggaggtgaggagagtgggttaagataattggaagtttttagaaagggaagttatggggtggtagttgaaattagaagagggtgtgagtgtttaatatttttaattttttttttgtgaaaagaattagagtatgtttttaagttgatagaagtggtttagtggaaaggaggaaaattggtaaatcgggatagaggatagaattgttggagtgatttttaagtaagaaagaatggaatttattgtttagtgggaaataatttagttttagttaggagtataatttatttttagtaataggcgtgatggtaaaatatatgagtattaattttagagggtgtggtgggaatttgggaaggttttttggttgtgtttgtttttagagtgaagtaggaagaaaggttattagttaagagtgaatgtagagatagaagatatgaaatattttagtgaataagtaagagaaatgttgaattattgggtattatttaggatttatttggagttagtggttatgaatttaaagtgagattagttattatggttgtgtgtttttttttagttaaattcgaaatattgaaaggaatgggaagggagagttttgttatttgtttgatgatgttattatttaaatatgatgttttgtattgtattttgagaaatatatttttaaaggaagttttgtttttaaattttagagagagaatagggtatgttataaagtaagtatttaggataggttattagataaggtttgaattttttttatttttttgatttttgttttttaattttgttaaatttttttgttttttttttgtttttttgtgtaatagaggtttattgagtgaggattaagagtttatttttatgttgagtatagtagtgaatgggatatagtttttgttttttaaggagtttataatttataattaagtaggagaaaatagattcgatataattntttttttttttttttttttttttttttggagatagagttttgttttggtatttaggttatagtgtagtggtgtgattttggtttattgtagttttcgttttttaggtttacgttatttttttgttttaggtttttaagtagttgggattataggcgttcgttattatgtttagttaattttttgtattttttagtagagacggggttttattatgttagttaggatggttttaattttttgatttcgtgattcgttagtttcggttttttaaagtgttgggattataggcgttagttattgtgtttggtcgattcgatataatttttatattgtgtggngagatttgtgattgggtatggaaagttagaatttttggggtaggaatttttaagaggaagaagagggaaaaagtgttttagttatagaaagtaatatgtgttaaggtggtgaagtttgaagaatatatgtagtttttggggggtttttttgtttgtttgtttgnttggtngaaagaagtttttttttgtatttaggttggaggtaggggggggatttaattttttgtattgtattttgagaaaatatttttaaaggaagttttgtttttaaattttagagagagaatagggtatgttataaagtaagtatttaggataggttattagataaggtttgaattttttttatttttttgatttttgttttttaattttgttaaatttttttgttttttttttgtttttttgtgtaatagaggtttattgagtgaggattaagagtttatttttatgttgagtatagtagtgaatgggatatagtttttgttttttaaggagtttataatttataattaagtaggagaaaatagattcgatataattttttttttttttttttttttttttttttttttttgagatagagttttgttttggtatttaggttgtagtgtagtggtgtgattttggtttattgtagttttcgttttttaggtttacgttatttttttgttttaggtttttaagtagttgggattataggcgttcgttattatgtttagttaattttttgtattttttagtagagacggggttttattatgttagttaggatggttttaattttttgatttcgtgattcgttagtttcggttttttaaagtgttgggattataggcgttagttatcgtgtttggtcgattcgatataatttttatattgtgtggtgagatttgtgattgggtatggaaagttagaatttttggggtaggaatttttaagaggaagaagagggaaaagtgttttagttatagaaagtaatatgtgttaaggtggtgaagtttgaagaaatatatgtagttttttgggggtttttttgtttgtttgtttgtttttttgatggagttttattttgttatttaggttggagtgtagtggtgtgattttattttattgtaattttcgttttttaggtttaagtgatttttttgttttagttttttaagtagttgagattataggtatgtgttattacgtttagttaatatatgtagttttaatgaaagagaagtagttggatgtgtttggagttgaagggatttgtgaaagggtggtagaataagaggttggaagggtgggatttgttatatgtcgaagagttttgtggattatgttagtttattttgttggtagtgggaggttgttgaatatttgaagttagtgtgtgttatgattagattaatttaaaaaaggaaattgtgtaggatgagaaagaaagttttataaaataggtattttttttgtatattttgtttgttgtagtatttatagtgttttgtatttagtttgttggatgaatgaatagatgaattggaatagagttgagtttgtgtattagttttgtggttattggagtaattggagggaggaaagatgtaggtttgaatagaagaattgaaatgatagagaagtgacggttttagagagattttggaagcgggattgataggatgtggtggttatttggaggtgaggtaggaggaggagtagaggagggtgatattgaggtttatgaggatgggaataaaggaagaggcggtttggggaggttagagtgatatgttttgtatgaggtgtttgtgagatatagaggtgttttgagatagattggaatatgtgtttgaggttaagagagttcggagatgggtgttgagattttagatgtggaagttgttgattggtgggtagaggggtagttggtgaagttttggaagtaaatgtaattgtttaagaaaagggtgatgcgaagtggaatgggaggatttaatttgattttttttatttttattttttattattttttattattttatatattttgatgattttttttagatagaattagttattgttttttttgtgggttgatataatattttgtatttataattgttgtagtatttgagttttgttgagtttgtttgtatatttattattttttttgggttttgattatttagtgtgttgtttatttttgtattgttgatatttaattttcgttttgatttagtgtatttagtattgattagatttttgaattttgtgttatgatatttatgtggaagttaggtattggtatttatatagggaatgtattaaattgttttttaaattaagagtgattattttttttaattataggtaatatttttaagtaaattagaatgagagtatttatttaggaaatttgaatagggaaggtgaatttttgttttgattaaaattgggtatgtttagagggttttttttgtattttttttgttttaagttttattattttgattttgaaggtgtagatagcggtatgtaaggaaaattgattagtgaagtagtaattaatggtatttagtatgatttacgaagttatataagatgtgtgattganagttaaaagtttggtatttagaatttttgaaaatttaaaaaataaaatatttagtttgttttttaagattgtttatttttatagtgtattattatttttttgtgattattttacgattataagcgtaaattgaagaaaagattgttgtatgaaattttattgttagtgagttattttagtatttttattttatttttaaagatttaattagaaaagaggaaatttttttgtattttttaattaagaaatttaaatataaagtagtagagggtttttttaataatatgttttttttagtatttaaaattagtgattttatattattaatatgtgttttatttattttgagtataaatgattgggtaaagaatttttgggaaaaaatagtttatttattttaaatattgtatagtggattttttgtgtttgtgatttatttttttttttttattattgtttttatatttaggatgtaaaggtttagtttttgtttttaaaagtgagtttttagtttagttggagggagtgatgagtgaataaataattatagcgtaattttttggtaaattagagtaggtagtaattaattttgtttagagatgaagtggcgttggagagagtttaaggaggttttatagagaaggtggtagtggaaagttgaattatttggtaggtaaggcgggaggaggggatgttagattagtgagggttttttgtgttgagtagatgagtttggattataggaaggtgtgagaaaattttttgttttttttttttcgtaaatagttttttatgaaaaaaggttattaaagtaaaatgtattaagttttttttaagtttgttgattgatttttattaattttgtttagaatgtttttaagtttggagtttgtatgattttgggtatttagttttggggttagaatataatttgagggtaagtttttagtttagattattattttagttatagtatttatttttgagtagttattttataaatatttgttgattgaatgagtgagtgaatgaatgtagtattaaatatagtatttgaaataaagattttaattttttttggaaggattttttaaaaaagatattagatagttttatatgttttgattttgttggattttggtaaaagattttagaattggatttttttttttatgttttttattttgtttaggagatgaaaatgtttagaggtgataaatataggtttttatgaaatatagttgtattagacgtaaaataatgggatttgttattttgggtattatattatatgttattttgttgttagattttagtattatatagttatggtaggtattgttagtttatagaaaattttgtggggagaaaaaaatatgttttaggaaaagatgagtggtaataatagaattttttgttttagtttgtggaatgagaatagtggagttaatgaaaattaatatgttgaagtaatatatttttaagaaagtattttttatttttttttaaggttgtggtaatataataatagagaatattggtggttagggttttaagggaaggtttgatgttgtttgtaagttttgatattttttaaaatttataatattgagagtatattgaaagataggtcgggcgatgtggttaatttttgttattttagtattttgggaggttgaggcgggtagattatttgaggttaggagtttaagattagtttggttaatatggcgaaattttgtttttattaaaaatataaaaattagttaggtgtggtggtacgtgtttatagttttagttattcgggaggttgagaggttggagaattagttgaattcgggagttggaagttgtagtgagtcgagattattttattgtattttagtttgggtaatagagtaagattttgttttaaaaaaaaaaaaaaaaggaaagaaagataatagtagtggttcggcgtagtggtttacgtttgtaattttaatattttgggagattaaggtaggtggatcgtttgaatttaggagtttgagattaatttgggtaatatggtgaaattttgtatttgttaaaaatataaaaattagtcgggcgtggtggtatatatttgtagtggttttagttatttaagaggttgaggtaggagaatcgtttgaatttaggaaatagaggttgtagtgagtcgagattgtgttattgtattttagtttgggtaatagttagattttgttttaaaaataaataaataaataaataaataatatattggataggttaaatatattggatagttatttaggaggttgaggtgagaagattatttgagtttaggaggtagaggttgttgtgagttaagattatattattgtattttagtttgggtgatagagagagatttttattttaaaaggaaagatagtagttaagttgggatttaattaaattgtagtaagtttgagatagtgatattataagagattggttgaagaagtatggttttttgtagataggggtgttttggttattaggaggaggtttttgaagtaatggagagtaaaatattattatttttaggaattttttgtgaatattttgaaatatttgttaaaataaataaataaataatattttagtaagaagggaaaaaaaaaatttatgatgattaggtattatagtattgagaaagttatattgtgtttggttttaataaaattatgtaattttgaattattttttaaagtaattattttatatttgtgggtggtatttggtatagtttagttttagtggaattagtttaagaaatattgttttgtagtgaattatttaggttttttaaggttgagaaatatggatggtatagtttttaggatattttattattatttattgttattgtatgttgaagttgttttgtgattattaaattagttttttagaagttttggaatggggtatgggttatagagtattttgagtattaggtgttattgttttagttattggaattgtatattttttgttatatttaatttgttggtattttagaattaatgtgtttaaattgtatgagttaattttttggagttttgattgtttttagatgaattaatagtgtttgattttagagttttttttttttatttgtaatagttttttaaggtaattgtttttaatttttaaaaaatataagtaattttaataattgtttaattttagttatttaataaattagttacgtttatttttttatttaattaaaatagttttttagttattaaatagtagggattatattttagatttgttaaataatttataatttaaatattgattatttgggttaaatattttaagcgagggtttatttagggtagataggtatttgataatatatatatttaattatttcgtatttgattagtgtggtaggaatttagagttagagaagttttgaagaagtggtattttaggtttgttgggggaaaggatttagatataggtttggaagagtaggggagggtatttatttattggagtgtgggaagagtagggatcgaatagatgtgaagaagtatatataagttaggtggaggtggggattgagagatgagcgtgattgtataaatttatagatttatgttgtttgtttttattttgtttatttagagaggagttggggtggtatgtagtaaatgttatttattaaatgtgtgggtttttatgttgagatattagtattttaattagtaattataagtggaaggatgtttttttttttttttttgagaaagattatttttgatagaggagattgaggtttagatatagttttaagatttattttttattttttataaatgtaggttttagagggaattgaaattagtaatatattgtgtattttatttatttagttaggttattaggttgtaatttgttttttattttggaggagttttattttttagttggagaaatataatgataattgtagtgatggagttttatttagaatattaattatgtagaaaggaggattagttaatttagtttagaggtgttaggatttggaaaggttttatataggaggtttatttaaatagaattttgaggattgagtaagagttggttaggtgaggagaggaggcgttttaggaaatgggaaagtatatgtaaagttatatttgtaagagaatatggtatgattggagtttggttttgtaggagggtaggttatttaaaggaaagttaaggttagagaggtatatatagggattagatttttttgtgttttgtagattatgttaaagagtttggagtttgttatgaagtttgtttaggttttagtttagatgttattaattttttattgtatttagaatagaatttagattttttattatggttataaggttttatgtgatttggtttcggattgtttatgtggttatatttattttgagttatttttttattgtttgtttttgttatagttagttagtcgatagagagttgttaaaagattgtaagtagtgttattttatatttagtttggttatagtatggagtatggattgaagagagtaaggttagtattagaaaggtaagagatgataagaggttggttttgagtatggaggtgggaatggagagaaaaggataaatatgaaaaatgtagaagtaaatgtagaaggatttggtggttattgaggtttggtagaggagggatttttgttagtgagtggatggtgtgtttatattttgaggtttgggatataggaggaagtttaatttggtgggaaagatgattagtttatttaggaaatatgttgattttgaggtgtttgtggaatgttttaagtggagatgtttggagagtttttgaatagtttttggagtttatggaggtatgggttaaatattggtataaatgggaaaagataatttgaatgttgtggtattaggttgattttatttttaaaatatttttcgaaataattattattttttatttttttgttattatttcggggtaagttgttatattttttaattagtttgtttgtttttgttttagtttatttttatatagttagtggagtgattttttaaaaatgagaaggagttttataatttttttatttaaaattaatttttattaattttttattgtttttagaatagaatttagtttttttattataattataaagttttgtatgatttggttttggattttttgtttggttatatttatgttgagttatttttttattatttgtttatgttgtagttatattgtatggttttttttagggttttaaatttttgtattgttgtgtgttaagtttttttttttttttaggtttttgtatatgttattttttttgtatgaattgttattttttaggttttattttagatgttatttttttaagggagttttttttgattttttgggttatattagtgttattttgtatttttttttagtatttaatataatatgttagtagttaattgtgcgtttgtattatttatataagttttgtgacgataaaatttattttgtgttttgtttattattgtatttatagtttttgatagttttgagtttatagttagtattttatgaatattttttagatttgttgaatgaatgagattataattatttttattttttgttttgaaaaatttagaaattttatattgttatagtataaatagaatggtgatttaagtgatagaatttatggagttgattttatttatttttatatttttaattgttattaaatgttttgtttttggaaggttgagatatggaaattgtaaattaaattttaaaaggaattttttttttttattggttgtatttattatggtagttttggttagtatgaattgatttgttattagtttgataatggtacggttgttgagtttgaaatttagaaaattaatatttgtttttttgagtttgggcgtttgtggtagagtttagtagtagtttttttttttagttttgatttgggaagtattttaatatatgttatttgtattgtagt

SEQ ID NO: 38 - DNA, 17848 bp, Artificial Sequence
  chemically treated genomic DNA (Homo sapiens)
  unsure (6075, 8510, 8516, 8680, 9019, 15666)
gttgtaatgtaaatagtatgtattgggatgttttttaaattagggttgaaggagaaggttgttattaaattttgttataaacgtttaaatttaagggaataagtattagttttttgaattttaaatttagtagtcgtattattgttagattgataatagattaatttatgttaattagaattattataatgaatatagttaatagggaggaaaaattttttttaagatttaatttgtaatttttatgttttaattttttagaggtagagtatttaataatagttgaaaatgtaaaagtagatgaaattagttttataagttttattatttgagttattattttatttgtattgtgatagtgtaaaatttttaagttttttaagataaaaaataaaaatgattataattttatttatttaataaatttaaaaaatatttatggagtgttgattatgagtttaggattgttaggaattgtgggtataatggtaaataaaatatagaatggattttgtcgttatagagtttgtatgggtgatataaacgtataattaattattaatatattgtgttaggtgttaggaaaaaatgtaggatggtattaatatagtttaggaggttagaggagatttttttgaaaaaatgatatttgaggtaagatttaaaagatgataatttatgtaaagggagtagtatatgtaaagatttgaaagagagaaagaatttgatatataataatatagaagtttgaggttttagaagaagttatatagtatggttatagtatgagtaagtgatggagaagtggtttaatatgggtgtggttagatagggagtttagggttaggttatatagggttttgtagttatggtaagaagattgaattttattttaagggtaatgggaagttagtgaagattggttttaagtaggaaaattataagatttttttttatttttagaagattattttattagttgtgtaagaatgggttgaagtagaagtaggtagattagttaaaagatatagtagtttgtttcgaggtgatggtagaggagtgaaaagtagtggttgtttcgagaaatattttggagatgaaattaatttagtattataatatttaagttatttttttttatttatattaatgtttggtttatatttttatgagttttagagattatttaagaattttttagatatttttatttgggatattttataaatattttaaagttaatatattttttaaatgaattaattattttttttattaaattgagtttttttttgtattttagattttagggtatgaatatattatttatttattgatagaagttttttttttgttaaattttagtggttattaaatttttttgtatttgtttttatattttttatatttgtttttttttttttatttttatttttatgtttaagattagttttttattattttttgtttttttgatgttggttttgttttttttaatttatgttttatattgtggttagattgaatatgaaataatattgtttataattttttgatagttttttatcggttaattggttatagtaagggtaagtaatggaggagtggtttaagatgggtgtggttatatgggtagttcggggttagattatatagggttttgtggttatggtaagaggtttgaattttattttaagtgtaatgggaagttagtgatatttgagttaagatttgaataagttttatgataaattttaaattttttaatatggtttgtaagatataagaagatttgatttttgtgtatgtttttttggttttggtttttttttaggtagtttatttttttgtaggattaaattttaattatgttatgtttttttgtaaatatgattttgtatatgtttttttattttttgaagcgttttttttttttatttgattaatttttatttaatttttaaggttttgtttagatgaattttttgtgtgaagtttttttagattttgatatttttaagttggattagttagtttttttttttgtatggttggtattttgggtgagattttattattgtaattgttattgtgtttttttagttagaggatggggtttttttagggtagaaaataaattataatttaatgatttagttgaatgaataaaatatataatatattattaattttagttttttttgaaatttatatttgtgaaaaataaaaaataaattttaagattgtatttggattttaattttttttattagaagtaattttttttaagggaaagaaggggggtatttttttatttatggttattgattggggtgttgatgttttagtataagaatttatatatttaatagatgatatttattatatgttattttaatttttttttgaataggtaggataagaataaatagtatgaatttgtggatttgtatagttacgtttattttttagtttttatttttatttaatttgtgtgtgtttttttatatttgttcgatttttgttttttttatattttaatgaataaatgtttttttttgtttttttaggtttgtgtttaaatttttttttttagtaagtttaaggtgttatttttttaggatttttttagttttgaatttttattatattggttaggtgcgaagtggttgaatgtgtatattattagatatttgtttgttttgagtaagttttcgtttaaaatatttggtttagatggttaatatttagattgtaggttgtttaataagtttaaaatatggtttttgttatttaatagttaaaaagttattttaattaaatgaaaagataaacgtagttgatttgttagatggttgggattgaataattgttagaattatttatattttttaaaagttaaaaataattattttaaaaaattgttgtagatggaaaggaagggttttgaggttagatattattagtttatttaagagtagttaggattttaagaaattgatttatgtaatttaaatatattaattttagaatgttaataaattagatgtaataggaaatatatagttttaatgattggaataataatatttaatatttagggtattttgtaatttatgttttattttaaggtttttggaaagttagtttagtaattataaggtagttttagtatataatgatagtaaatggtggtgaaatgttttgagagttgtgttatttatgttttttagttttggagagtttgggtaatttattatagggtagtattttttaaattaattttattggaattgagttgtgttaggtattatttatagatgtggaataattattttaaaaaataatttaaagttatatggttttattaaagttagatatagtataatttttttagtgttgtgatatttgattattatagattttttttttttttttttgttggggtgttgtttgtttgtttgttttgataaatgttttaagatgtttatagggggtttttaagagtggtggtgttttgttttttattgttttagaagtttttttttagtgattagaatatttttgtttatagaaagttatatttttttagttaattttttatgatattattattttagatttattgtaatttagttagattttagtttagttgttatttttttttttgagatgggggtttttttttgttatttaggttggagtgtagtggtgtgattttggtttatagtaatttttgttttttgggtttaggtgatttttttattttagttttttgagtagttgtttagtatgtttgatttgtttaatatattgtttgtttgtttatttatttatttttgagatagagtttagttgttgtttaggttggagtgtagtggtataatttcggtttattgtaatttttgttttttgggtttaagcgatttttttgttttagttttttgagtagttgggattattataggtgtgtgttattacgttcggttaatttttgtatttttggtagatatagggttttattatgttgtttaggttggttttaaatttttgagtttaagcgatttatttgttttggttttttaaagtgttgggattataggcgtgagttattgcgtcgggttattgttgttatttttttttttttttttttttttttttgagatagagttttgttttattgtttaggttggagtgtagtggggtgatttcggtttattgtaatttttaattttcgggtttaattgattttttagttttttagtttttcgagtaattgggattataagtacgtgttattatatttgattaatttttgtatttttagtagagatagggtttcgttatgttggttaggttggttttgaatttttgattttaggtgatttgttcgttttagttttttaaagtgttgggatgataggggttagttatatcgttcggtttgttttttaatatatttttagtattatgaattttggaaggtattagaatttataagtagtattaaatttttttttaggattttggttattagtgttttttgttgttatattgttataattttaaaaaaaggtggaaggtatttttttaagagtatattattttaatatgttgatttttattagttttattatttttattttataagttgggataaagagttttgttgttattatttatttttttttaaggtatgtttttttttttttataaaattttttataaattgataatgtttattatagttatgtaatgttaaaatttagtagtaagatagtatatgatgtaatatttaaaataatagattttattattttacgtttaatatagttgtattttataggagtttatatttattatttttaggtatttttattttttgaataagatgaaaaatatgagaaaaaaaatttaattttgaaattttttattaaaatttaataaagttagaatatataaaattgtttaatgttttttttaaaaagtttttttaaaaaaaattgaagtttttattttagatattgtatttgatgttgtatttatttatttatttatttaattaataaatgtttatggagtagttatttagaggtaagtattataattgaaatgatgatttaggttgagagtttgtttttaagttatattttaattttaagattgagtatttaggattatataggttttaagtttaaaggtattttaggtaaagttaataaaaattagttagtaggtttaaaaaaaatttaatatattttattttgatgatttttttttatgaaaaattgtttacgaaaaaaaaaaggtaaaaaatttttttatatttttttatgatttaaatttatttgtttagtataaaagatttttattgatttgatatttttttttttcgttttgtttattaggtgatttagttttttattgttattttttttgtgaagtttttttgaattttttttagcgttattttatttttaggtagagttaattattgtttgttttggtttattaaaggattacgttgtaattatttgtttatttattattttttttagttagattgggagtttatttttgaagatagagattgaatttttgtattttgagtatgagaatagtgatggagggaaggaggtgagttataggtatagagaatttattatatagtatttgaaataaataggttatttttttttaaggattttttgtttaattatttatatttaaaataagtaagatatatattagtgatgtgaagttattaattttgaatgttggaggaaatatgttattagggaagttttttattgttttatgtttaagttttttgattgaaaagtgtaaaagagtttttttttttttggttgggtttttgaaaataaggtaaaaatgttgagatgatttattgatagtgagattttatatagtaattttttttttaatttacgtttgtaatcgtaagataattataagaagatgataatatattgtagggatgaatagttttaaaagataggttaggtgttttattttttagatttttaggggttttaggtattaagtttttgattnttaattatatattttatatggtttcgtaagttatgttagatgttattagttgttattttattgattaattttttttatatgtcgttgtttgtatttttaggattagaataataggatttagagtagaaggaatataagaaaagttttttaaatatatttaattttggttaggataggggtttattttttttgtttaggttttttgaatgggtgtttttattttgatttgtttgaggatgttatttgtgattagagaagatgattatttttgatttaaaaagtagtttaatatattttttgtgtgggtattaatgtttaatttttatatggatattatagtataggatttaagaatttggttagtattgagtatattgggttaaggcgggggttaggtgttagtaatataaagatgaatagtatattgagtggttagagtttaaggaaggtggtgaatgtgtaaataagtttagtagaatttaagtgttgtagtagttgtgggtataaaatgttatgttagtttatagaggaggtagtgattaattttgtttagggagagttattagggtgtgtggggtgatgaagagtagtgggagatgaaagtaaaaagagttagattaggtttttttattttatttcgtattattttttttttgggtaattgtatttatttttaaggttttattaattatttttttatttattagttaataatttttatatttgaaattttagtatttattttcggatttttttgattttaggtatatattttaatttgttttagaatatttttatgttttataggtattttatataaaatatattattttaatttttttagatcgtttttttttttatttttatttttatgaattttagtgttatttttttttatttttttttttattttatttttaagtggttattatattttgttaatttcgtttttaaaatttttttgaaatcgttatttttttgttattttagtttttttatttaggtttgtattttttttttttttaattattttaatagttataaaattagtgtatagatttaattttgttttaatttatttatttatttatttaataaattggatgtaaggtattatgggtattgtagtaaataaaatatataaagaaagtgtttgttttatggagtttttttttttattttatataatttttttttttaaattaatttggttatggtatatattggttttaagtgtttaatagttttttattgttaataggataaattagtatggtttataaggtttttcgatatatggtaaattttatttttttaattttttgttttgttatttttttataggtttttttaattttaggtatatttaattattttttttttattaaaattgtatgtgttagttaggcgtggtggtatatgtttgtagttttagttatttgggaggttgagataggagaattatttgaatttgggaagcggaggttgtagtgagatgagattatattattgtattttagtttgggtgatagaatgagattttattaaaaaaataaataaataaataaaaaaatttttaaaaaattgtatgtgtttttttaggttttattattttggtatatgttgttttttatggttgaaatatttttttttttttttttttttgggaatttttattttagagattttggttttttatgtttaattataaattttattatatagtatgaaaattatgtcgagtcggttaggtacggtggttaacgtttataattttagtattttgggaggtcgaagttggcggattacgaggttaggagattgagattattttggttaatatggtgaaatttcgtttttattaaaaaatataagaaattagttgggtatggtggcgggcgtttgtagttttagttatttgggagtttgaggtaggagaatggcgtgaatttgggaggcggaggttgtagtgagttaagattatattattgtattgtagtttgggtgttagagtaagattttgttttaaaaaaaaaaaaaaaaaaagaaaaaaaaaaagaaaattatgtcgaatttgtttttttttatttagttgtgagttgtgagttttttgaaggataggagttgtattttatttattgttgtgtttagtatgagagtggatttttagtttttatttagtaagtttttgttgtataagaaagtaaggaagaagtagagaaatttgataaggttaagaagtaaaagttaggaaaatagagggagtttaaattttatttgatgatttgttttaagtatttattttgtgatatattttgttttttttttgggatttgaggatagagttttttttaggggtgtttttttaaagtatagtataaaaagttagattttttttttgtttttagtttgggtatagaaaaaggttttttttnattaantaaataaataaataaaaaaattttttaaaaattgtatgtgttttttaggttttattattttggtatatgttgttttttatggttgaaatattttttttttttttttttttttgggaatttttattttagagattttggttttttatgtttaattataaattttnttatatagtatgaaaattatgtcgagtcggttaggtatagtggttaacgtttataattttagtattttgggaggtcgaagttggcggattacgaggttaggagattgagattattttggttaatatggtgaaatttcgtttttattaaaaaatataagaaattagttgggtatggtggcgggcgtttgtagttttagttatttggaggtttgaggtaggagaatggcgtgaatttgggaggcggaggttgtagtgagttaagattatattattgtattgtagtttgggtgttagagtaagattttgtttttaaaaaaaaaaaaaaaaaaaaaaaaaganaattatgtcgaatttgtttttttttatttagttgtgagttgtgagttttttgaaggataggagttgtattttatttattgttgtgtttagtatgagagtggatttttagtttttatttagtaagtttttgttgtataagaaagtaaggaagaagtagagaaatttgataaggttaagaagtaaaagttaggaaaatagagggagtttaaattttatttgatgatttgttttaagtatttattttgtgatatattttgttttttttttgggatttgaggatagagttttttttaggggtgtgttttttaaagtataatataaaatattatatttaaataataatattattaggtaaatagtaggattttttttttttattttttttaatgtttcggatttggttggagaaaaatatatagttatggtgattggttttattttaaatttatgattattaattttaagtgggttttaaatggtatttagtaatttaatattttttttgtttatttattagagtattttatgttttttgtttttatatttatttttagttgatgatttttttttttattttattttgaaaatagatataattaaaagatttttttaagtttttattatattttttgaagttggtgtttatatattttgttattacgtttgttattagggatgaattgtgtttttagttaagattaaattattttttattgggtaatagattttatttttttttgtttaaaaattattttagtaattttattttttgtttcgatttattaattttttttttttttattagattatttttgttaatttaaaaatatgttttaattttttttataaaaagaaaattaaaaatgttaaatatttatatttttttttaattttagttattattttatgatttttttttttaaaaatttttagttattttaatttattttttttattttttattttttttgaatttatattaattaggtttttatttttaatatttttaaaattgttttttttaagtttattaaagatttttatttatttaaatagtataatatagttgattatttttttttattgaatattttttttatttggtttttaggatattatttttttttgttttttttttttattttagtaggtattttttaatagtttttgtttatttttttttatttttttagttttataatatttgtatgtttagggtttagttttttttattaatatatagtttttggtattaaatattatttatatttatagttttagttcggggagattttaattttgaatttatatatttaattatttatttaatatttttatttggatattaataggtatgtaaaaatttaatatgtttaaaattaaggtttatttttgtaattttagtattttgggaagttaaggtaggaggattaattgagtttaggagattaagattagtttggaaaatatagtgagattttgtttttataaaaaatatataaaattagttacgtatagtggtaaatatttgtggatttagttatttaagaggttaaggtgggaggatggtttgagtttgggaggtaggttgtagtgagatgtaattgtattattgtattttagtttggtaatagggtaagattatattaaaggaggggaagcgaggggaggggaggaagaaggaaaggaggaaataaaagaaaattaggagtttattttttaagtatttaagttaaaataattggagttattattggtttttttttttattttatattttgtatttaatttgttattaaatttaattggttttattttaaaatataattagaatttaattattttttattatttttattgttaaattttatttaaaatgtaatttaatttttgttaacgtataattagaatttaattacgttttattatttttattttttataatattataattattgtaatattatttaatattttttatttttaatgttattagttatagtgatttttttataatttaagtaaaattgttatttgattttttaaattttttaatggttatttatttcggtaagattaaaaatttatgataaggtttataaaatttggttattttttgggtttttgttttaattttttttttatttttgtttattcgattttagttataacgattttttttttatttttcgaatatattttttattttagggtttttttaattgttttttattttgtttagaagattttttttttaggtatttacgtgatttgtttttttatttttagttttttgtttagatgttatttttttagtgaggttttgtttattttatttaaaatgataatttcggttaggtgtagtggttaacgtttataattttagtattttgggaggtcgaggtaggcggattatttgaggttaggagtttgagattagtttggttaatatggtgaaattttgtttttattaataaaataaaaattaattgggtgtggtggcgggtgtttttaattttagttattcgggaggttgaggtaggagaatcgtttgaattagggaggtagaggttgtagtgagtcgagatcgtgttattgtattttagtttgggtaataagagtaaaattttattttaaataaaataaaataaaaattttttttaattttttatttttaatttttttttattatatttattattttttaatatattgtttattttgtttaatttatgttgtttattgtttatttttttttatttgagttttatgagagtagagatttttatttgttttatttatagttgtattttttaggttaagaatagtgttggtatatggaagtggtttaaaaggtgatttgttgaatgaataaaaaaagaaatttttagtttgttgttacgtttttagtatttaatatttgttaagttttttttaggggtttagtgatttggtagataaaagtattaagttagaatttattaatattaaatcgaaatgttttgtttttattttgttttttgattattttttatttaagatattggattttatttttttaataaaataatttttaatttaatatatgtttttaagtttaaaaagtgaggtttttttaagaaaagttttaagaaattattatgtaattagtataggtatagggtaaaaattgtgaatgtggtatttgaacgattgaaatttaggaatttttttcgaatagggttgttagataaaatataggatatagttaaatttgaatttttaatgagtgatttcgttgttgttttgttgtaaggatgttttaaatattgtattggatatatattaaaaattattcgttattttaaattttattttaattggatattatttttaatttttgttaaatatggtaattttatttaggagaataaataaattgtattcgtttgtcgttttaatttcgatttattataaatagttaatataatttttgttttatttattaattgcgtggtttttatgttttaataaatatgtttttgtgggcgggtattgaggttcgatattttaaaaataaggaggtaaagatatatagtgtattttgcgaggggaaaggtttttttcgtagtttagaaaaagaggtcggtcgtattagacgtaggttatttcgggtttagttttttttttagtttttgtcgtttgcgtggcggaggttaaggtttggtagtcgtttttcggtttttattaatgttgttttcgatggagagttttcggggttcgcgtttcgcgtgtaggtttttggaggaggaaacgttttcgagtgggtttttggttatggaattgaagggtgttcgaagtcgatttagaaagaggcggttcgcggttattttatttacgatttatatagcgattattttcgtcgagagtattttcgttttaggtatcgttgtttattcgttttagcgtatcgttgacgtaaggagatcgttagataggaagtgggtggggttgaatatgcgacggggtgcgtttaagagatcgtttcgttatcgcgatgtttgtaaagaagcgttgagtgaaggaagttttgtaacggtgtagaatttgatagtaaaaggagttgcggtgcgagtggtttttgtttattggataaataatattttaaaagacgtaattttataatttaattattttatttttgtataattttaaaataaattttataattgaagataaaattaaaaatagaaattgtaattttaagaggggattttttttttttaggtgtttgttgtttggtttttattttaatatcggaagaaaatggaagttttaaagtaggaaaatgatttaatttgatgatttatataaatttaatttttttttattttttgtaatttttttgtataatgttggtatattattgattaaattaataaattagataattagttatattttattttttagtttgtgttttgaataagtaaataaatgttcggttaatcgatttgtattatatttaaaaatttttttaggataaggtggtggtggtttaggtatgtgattggaaattgtttaaatttggtaggttgggtttttggacgtaagtaatggcgagtagagatttgtataaaatttgagttttgttgtcggtgaagtgtgttttgtaggagggtagggatttaagttgttgttataggtgaagtcggattgttatatttcgtcgttataataattttagaagtaatgatttataaaatgttgttaaatggtgtttttagttttaatcgtttaaattattaatagttaaaattaggagttaataggttaaatcggtttttaggtagcgtttttaggtgtggtaggttttagaagataaggatttgattgtaagggggttggggaggggtcgggggttgggatatttgttttgaagttgtttttataaaaagtacgggattttttttttatgttgatgtatatataggatggttgaggttatgtttatatattaagaattttttttttaatcgaattttttaaggataattagggtggggcgttaatggttattggagcggttaaagttttatttatttttatttttattttagtagttatttttgttaaaataaaataaaataaaataaaaaaaaaaaataaaaaaaaattgtttatatttttttatttatgtaaatttagatttggaaaatatttatttaaaaaagtttgagaggttttttgtttcgttaggattttgttgttttaggggtgttgtgaaagttaaatgaggaagttgtttgtaggtaggtattaattttttaaaagttacgaggtaggaaaatagggtttggagatagggaatttaaggtcgatttaggttgattttttagaattaaattaaaaggaaaattttaattttttagtttaagtaataaaaggattagaagttaattttttttttgggtggtagataaaaaattgaaagtatttttgattggttttcgcgggtaattagttaggttggtggtaggttaagtttttagttgtatggggtataattttataattttattttagtttttgattggtttttttttgtaattaattagattgatcgttggttattattttatttatatagggtgtatattaggtaattaatgggaaatttttagaaggtatttaaattttagaaaattttgtaattgttgtttgtttgggttttttttatcggaaggagtgttttttgatgtataataaatttgtgtttttgttgttttattgtttttttgttttgtacgttttgtttaattttttgtttaaaatgttaagaatttgggtattttttattagtaatagagtttttaaaaattatttttaaaaattttatggtgaagtggtttggcgcggtggtttacgtttgtaattttagtattttgggaggttgacgagggcggattacgaggttaggagattaagattattttggttaatatggtgaaattttgtttttattaaatagagagaaaaaaaaaaaagcggagtgtggtggtgggtttttgtagttttagttatttaggaggttgaggtaggagaatggtttgaatcggggaggcggagtttgtagtgagtcgagatcgcgttattgtgttttagtttgggcgatagagcgagatttcgttttaaaaaaaaaaaaaaaaaaaaaattatggtaaagtatagtatgtagtgaggaaaagaggatgtgttgtgtagtgaggaaaagaggatgtgttgtaagtgtatagtttaatgaagtttttataaatggaatgattgttatttggatttagattaagaaatagtattattcgtatttttagaattttttatattcgttgttagttattattttttaaagataattattagtttgattttaatagtagagattagttttgcgttttttttatataaatggaattatatagtaaatattttttttatttaatatatttgtgagatttatttaggttgaatgtattagttgtagtttatttatttttattgttgtatagtatttataaatgttattatattataatgtattcggaagtttttagatttgagttataatgaatagtgttgcggtaaatatttttgtatatgttttttggtanaaagaagtatgtattttttttgggtgtataagtaagattggaattgttgtgtaataagttatatatatatgtttagttttgatagatatttttaaatagtagatagttttatagtgtttgttttagttgatattgttattattagtgagagagagttttggtttttttatatttttattaatagttgatattgttagttttttaaattttatttattttgttgtgtgtaattataatttattgtggttttaatttgtatttttttgttgattaatgaagttaaatatttttttgtatgtttattggttattttagtattttttgttgaagttttatgtttatttttttattggttgttttttgtttgttttattttttaaatattttggatgagttttttgtgaatattttatttttgtggtttgttttttttttttttttttttttttttttttttttttttttttttttttttttttttttttttttttgtgttgagatagagttttttgtttaggttggagtgtagtggggtaattttggtttattgtaatttttattttttagatttaagcgatttttatgttttagttttttaagtagttgggattataggtatgtgttatgttcgattaattttttgtatttttagtagagacggggttttgttatgttggtttggttgtttttgagtttttggttttaagttatttatttatttttgttttttaaagtgttgggattataggtatgagttatagtatttagtttttaaaaatatttaaaatttttttgatgtagagtgtaatgtaagaaattaaaatattttttgtttaagttgtttgttagttattttaatttattagtaataatttttttatttttttttagttatttatgtttgttttgttaaatgttttttatttatttaggttttaattttaaatttttagaagggagaatttgattggtttagttgtgtttaggtatttaattatggtttaattagttgtggttaaggaagagggttggggttttatttttgtatatgaggaagtataattaaggggatttttatgaggaaagaagatattttaaagaggtggtgattatttttttttcgaagtagtaaatacggagtttttattttatttgggtgttagttagaagattgaaagtagtggtatattggtgagtagaattattttttttttatttgggagaacgaggttattttttgtttttgggcgattttgttttgggtaaaatgttgttttgtaagaattttagttatttagtatttatttatttatttaatatttgttgagtatttattgtatgttagatattttgtttagtttttgaagtgtagttttgaaggatttattatttttttagtgtttttaaatgttatcgtatatataaaatattgattaatattatttaaaatgttatgtagttattaaaaaagggagataaatatataaaaatgtggtttaaattttattttgtagtttggatttttagttagttatattttatttattttgaagattttataatgtgttggattgtgttaaatcgatttggttaaattggaaagtatatttttagaacgttttattaataaggttttgagttagagttggttaaaagaggatttggggtgagatttggaaggtagagtgggagtgttagttatttttttgtggaaattttttagttagatgttatgatagatagaggtgtttagtagataggttttatttagttttttatttatttgtgattttttttggagtattttatagttttttgtagatttttatttttttagtttttttagtttttggggaaagtgttatttttgtaataaagtttttatttttataatatttataatggttttgtttttttgaatgaattgtattgatatatttaattataaagggagacgtattaaaaggtggttaatagtgtgggttttggattttagtgatttgggggtgaggattaagagagagaatttatttgttatatttgttatatagttattatttaatagatattatataatatataataagtaatggttgtttttttaggtttttagtgtttgggatattgtttttttttttttttttttgatagggtttcgtttgttagaggttggtttgaatta

SEQ ID NO: 39 - DNA, 7195 bp, Artificial Sequence
  chemically treated genomic DNA (Homo sapiens)
aatgagtattttgttttatgatggaatgttttaaattgaaatatagatttttttagttataggaaatgatgataattttttattaatttttttagtttttttattttttaatgatcgttaaagaatatattttttcgaggaggagtttgagagttttgtttaaatttataaaaaattaagatagtttaattgtttattggagattttttttatgggaggtttgggtagaaggatagtgatttagatggaggtcggagatgagaaagaggagtaaagaaagtaataaaagtatgggtaaatatttttttaatgattataaaaagtagtaaaataatgatgtttattgagattaaaagatatatttaatatattagatagtaatagtatatttgttaaaagaagggttaatggtgttaaagtagtttaaggtttttgagttatttagaagataattattttgattaattttatattttagatattgtatgttttaatttatttaaaataataaaattaaagagtaaaatatttaaattagaggggaaaggtgaaataaaaaatatttagtaaattttatagaaggtaggaaaaggttttaaaaaggaatatttgaaatttaaattaagataggtttaaatttattatgaaggttatatgatagtggaggaaataaatagttaacgagttaagtgaatatatatgtaattttatatagtaatatatattatgtagaaaaatttaatagggtaaagtattagatgttgtttaggaggagattatttttaggtaagggaagatttaagatagaaagaggaggtaagtaagattttaagggtttttatcgtgagtaataataggttgagaagggaagaggagttaaggagattgaggagatagttagtgaaatgggaggaagtgttttaagaaggatggtatgattaattgtgaaattaagaatgtttggtttatttattataaatattttttttagatttggaaatatagttagtagtaaggttagtattaagttattataaggttaggtatagtggttgatgtttgtaattttagtatttgggtaggttaagaaaggcggattgtttgagtttaggagtttaagagattcgttatgggtaatatggtgaaattgtatttttataaaatgtacgaaaaattagttaggcgtggttgtacgtgtttgtagttttagttatttggaaggttggggtggaaggattatttgtattttagttttggtgatagagtaagattttgttttaatattaataattgtaaaagagttattatagatttaataggggatatataaatttatagcgtatagtggttaaacgtaagggttttgaggttagattatttgaattgtggtttaatttttttttagttgtgatttgtgtgattttgggtaagttatttaattattttgtgttttggtatttttatttgtaaaatggggataaagaatttgttttttttagttgttatgattaaacgagtttttttttttgagatagggttttattttgttgtttagattggaatgtagtggtatgataataattgtttgtagttttttaatttttgtgtttaagtgatttttttatttttgttttttgagtagttagggttatatgtgtttgttatttattatgtttggttaattttgtatatgttttgtagagatggggtttgtttacgttgtttaggttggtttcgaatttttgagttgaagtaatttttttattttgattttttaaagtgttgggattataggtgtgagttattgtatttagttaattttttttttttttttttttttgcgacgtcgttttgtttttgttgtttaggttggagtgtaatggcgtaattttagtttatcgtaattttcgtttttcgagtttaagcgatttttttgttttagtttttcgagtagttgggattatatgaatgtgttattatatgcggttaattttgtagttttagtagagacggggtttttttatgttggttaggttggtttcgaattttcgattttaggtgattcgttcgttttagttttttaaagtgttgggattataggtgtgagttattacgtttggtttcgagttaatattttttaaagtatttagaatatatttgatataaagtagtaataatgtgtatttttgttaaaatgagagagaaatttttaaaatggtaaagataggaaaaataattatgttttttaagtattgatttgtatttttagaaggtttaaattggtattagatttaggtaattgaattaattagtatgattgataggataattatagtttgataaagaaaatattatgaagggtagggtgcggtggtttacgtttgtaattttagtattttgggaggtcgaggtgggcggattatttgaggtcgggagttcgagattagtttgattaatatggagaaattttatttttattaaaaatataaaattagttaggcgtggtggcgtatgtttgtaattttagttatttggaaggttgaggaggagaattgtttgaatttgggaggaggttggggtgagtcgagatcgagttattgtattttagtaaggttttgttttaaaaaaaaaaataaaaattatgaagtaaattatggttgaaatatgtttagtttttaattgtagtattttgtatttaaggtgtatgtttataataagttatatttttattgttataaagaacgttttattaaatgtttattggtttagaattttattattttttgttagttagattatggtcgttttttttttagtttaaaataaatttagttgaaaagtaataataaatattttatgtatatagattaataataaaaaatagaaggtaatttgtttggtgttagatattgtaataagttaaataagtaatttttgtgtaaatattgaagtaagtgttttgaagaatttataaaagtttatgattttaatttatgtgagagataaaatgtatatatattagaagattatataatgaaagtatatggttaacgattaatgaatgatatagtaagtgttaaaagagataagatggggtagaggttattattgattgtaaaaagttttatgaatgaagcgagatttttatttgggtttaggaaaatgaagtcgttataattattatattttagtataagtaaggaattaaatagtatgttttttatgtgaatattttaagtaaataattggagaaagtattttaataaaataagggagtaaaataatgttggtttaaaatgaggtcgaaaagttgtagggttcggatcgtgttgttaaaggtataaatttgggagtttttaagttgtagttaatagttaacgtttagagaaggtagtgtatattttatagttttatgtaaaggaattttaattacgaagacgaattagttaaggagatcgaaaagggggggtttgtatggaaaggtatagtaacgaatgtaaaatttttttaataatattttaaaattgttttatagtttttttaattttgaaaatttaaaattatttaatttagttcgtagatttttgtgagaaataaggagatatttgtagtttagaaaaaattattaataattatttagaaagttattgttttattttttattgtaaattatattattacgattcgggatttttgttcgatttttagttaaggggtttttattgcgtttttgttgggttattttaaatttgtgataggatagtagcgttttttttgttttcggtcgaataaatattataacgtttgatattcggtgttgaaaggaaatcgggcgcggtgttttgtttatagtttggggagcggtttcgggcgtaataattgttatcggcgtcgagatgcggtttcggcgtttagggcgtcgttaaatttagagttcgggagttatggttgcgggcggtgtcgttttaggtaaattagtttaggagtagggttcgggtttggcgtatattttcggaaaaatgggggttagagtaaataagaagagcgaaagtaagagggttaggtagttagaggcggtagtaagatttaagacgttaacggcgtcgtttttttggggttttagggtttgcgttatttttgggttgtcggggtatcgtttttttacgtttttcgttcggcggcggttgcgattgttttcgaggttatgtttttaggacgggcgcgtttttagggtggaagtttggcgtacgttcggaggtgtcgaggatttaattagtttaaattttgggggaaatgatttttttttgttttcgtttcgcgttttgttattatttttttacgtttttgtttcgtttagcgatgtaaaacgcgcgaggcgtacggtagagggtcgaagtcgcggtatttttcgggttaggttcgtttttcggtcgcgtcgcgtagtacgggatttttcggtcgttgtttagcgttggtcgtttgagttaaggttgtcgcggagttagtatagtcggggtcgttggttggaagggcgagttttttaaggcggggggaagttcggcgtcggggtcgggtaggaaaggcgggggaggggtttcggtcgtttggaaggaatttacgcggtttgaggttgtgggggaagtagggtggcgagcggtttttttgcgcgcggggggcggggggggtggggtggtttattagggttttttggcgagggggcggttttttagtgtgtgagggcgacgttttagaagtttttttttaaagttggttttacgcgttgaatgtggaaagttgattgggatttagtagttttttattttaaatttgtttttcgagaagggttttaaatttaaaatgtgaatttcgtttttttttttagttagaattgtggattcgtttcggggaggggcggtgggtggggcggggttggcgggaaatttcggttttggcgcgttttttgcggcgacgtttatcgtgcgttttttttttttttcggtggttttttcgttcgttttttggttttgttatgttttgttttgaagagatattcgttattttatttagtaagcgggttcggtttgcggaggtgggcggtatgtagtttcgttttgttcggtttttcgagtacgttacggtttttattcggggtttcgcgcgcgtcgcgggttacgatttgtataggtgagcggggatttgtcggcgaggaggttgggaagggtcggtcgttcgttgttatagttagaaatagttatcggagagattataggaatatattagttataaataggatttttgtttttttcgtgtttaaaattttagtttttatttttggtataaattaaatagagatttgggtaaagattgtagaataagtaaaatagttatacggtgtttagtaaggcgttattttgtaacgtttattgtgttttttttaaatagaagatagagaggaaggtttatggtggttttcgagtggttcgagggtgatgttgtgtttaatagaaaaattaaggtgagagtttagatgtgagcgtgaaaatatttaagaaggatgaacgaagatgtatttgttttaaaaagttattttttatatatttattcggtttagggcggaatttgagaaggtatttgaaaacgaaaggtagagttgtttgtaatttattatatttttatttttatagtacgttttatttgtattaaaaatttttcgtatgttgttgtatttagtttttataataatttttaattagataagtgttattttttatataggtaggagtttgtgaagagttgaattgatttttttagaggtttgaagatgatataattttttatttcgaattttgggtttttttttttttatttgattattgtgtttagtttttagaattattaaggtaggagaaaagtaatgttgagagggaaggagattttatattaaattttaagtattgggatttattttaaagtattttagataatttaaatatgagaattattagtttaagtataggagaagagaaagtagtgtttgatgatagtaatagaaaaaaaaggaaaaggaaagtaggtatggataattgtagttggaaaaattatagttttttaattttgatgaataaaagtagagtgatatagtttgattagatttttttaaagtatattttggagtatttttttgagttttaggggagtttttgatttaagatattttaagtagatttttaataaatataggtgattttttgtatattgaaattgatatggaaataatggattagtaataaattagggtttaattgtttaaagagggattttagtgaaagaaggggtagtattgttttattagagttaattaaggtttttaaagtaaattttcggttttgtttattgtaaaattttttaaatttttatttaggagagggttatagtaatattaagagtagtagtatttgttatgtggattttagaggaattttgtttttaagtaaggtttatttttaggggtcgtttacggtgattagttgttttttttagttaggaaatttatagtttaagtttggtaaattattaagttttgtttgatagatataatatagttttttattttttattttgtttattcgttttttttttttttttttgtatattttttttaattatatagattattgtgagaataaaatgggttaatatatgtaaattaattagaattgtttttggtatatagtaaaggtttaattaatgatagttagtattattagtagtatttggttttttttttttgttttttttttattttttttttttttaaattatggttgtaaagtatttattttttgaaagtttgtttttttgtttttttacgttgataagtattttagtttttaataaatttttgtttaggggtaaatatttataatgttgatatttttttatattattaaaaatatttatggagaattattttatttaaagttgtttttttaataataaaatagttatttttattttttttataaatttttaagatgaattggtaatttattatagtaaggttgattttagaaattaaagttgtattaatttattaaatatattgaaagtaattttgtatgtttggttataaagaaaatataaaaataattttataaatagatttgtagttatttttttttaatatttttttagt

SEQ ID NO: 40 - DNA, 7195 bp, Artificial Sequence
  chemically treated genomic DNA (Homo sapiens)
attaagaaaatattgaaagaaaataattgtaaatttatttataaaattgtttttatattttttttgtgattaagtatataaaattatttttagtgtatttaatgaattaatgtaattttagtttttaaaattaattttgttatgatgaattattaatttattttaaaagtttatgaagaaggtagaggtggttattttattattaaaaagatagttttagataaaataattttttatgaatatttttggtggtgtgaagagatgttaatattgtaaatgtttgtttttgaataaaagtttattggaaattgaggtatttattagcgtgaaagggtagaaaggtaaatttttaaaaggtggatgttttataattatagtttgaaaaggaaaaaaatgaagaaagaataaagaaaaaaggttaaatattattaataatattagttattattgattaagtttttattgtgtgttaggaatagttttaattggtttatatatattaatttattttatttttataatgatttgtgtgattagggaaaatatgtagaaggaaaggagaaaaacgggtggataaaataagagataaagaattgtgttgtatttgttaggtagggtttggtagtttattaagtttaggttatgaattttttggttgagggagatagttgattatcgtgaacggtttttggagatggattttgtttaggaatagaatttttttaaagtttatatagtaaatgttgttatttttgatattattgtggtttttttttgggtagaaatttaagagattttataatgagtagaatcggaagtttattttggagattttaattaattttggtaaagtagtattatttttttttttattgaaatttttttttaaatagttaagttttaatttattgttgatttattatttttatgttaattttagtatatagaaagttatttgtgtttattaggagtttatttaaggtattttaaattaaggatttttttaggatttaagaaagtgttttaaaatatattttggaaaggtttagttaaattatattattttatttttatttattaaaattaagagattgtagtttttttagttataattgtttatatttattttttttttttttttttttttgttgttattattaggtattattttttttttttttgtgtttagattaatagtttttatgtttgaattatttgagatattttaaaataaattttaatgtttgggatttagtataaaattttttttttttttagtattattttttttttattttaatggttttaagaattgggtatagtagttagatgaaaaaaaaaaagtttaaaattcgggataaaaaattatattatttttaagtttttggggaaattaatttagttttttataaatttttgtttgtgtaaaaagtaatatttatttagttaaggattgttgtgaggattaaatataatagtatacggaaagtttttagtataggtaaaacgtgttgtagagatgaaagtgtggtagattataggtagttttgtttttcgtttttagatgtttttttaaatttcgttttgggtcggatgaatgtatagaaaataattttttaaggtagatgtattttcgtttattttttttaggtatttttacgtttatatttaggtttttattttggtttttttattgagtatagtattattttcgggttattcgaaagttattatgggtttttttttttattttttatttaggaagggtataataaacgttgtaaagtaacgttttgttagatatcgtatagttattttatttattttgtagtttttgtttaaatttttatttaatttatgttaaagatgaaagttaaaattttaaatacgaaaaaggtagaaattttatttatagttagtgtgtttttgtgattttttcggtgattgtttttagttgtggtagcggacggtcggttttttttagttttttcgtcggtaggttttcgtttatttgtataggtcgtagttcgcggcgcgcgcggagtttcgggtgggggtcgtggcgtgttcggagagtcgggtaaagcggagttgtatgtcgtttattttcgtaggtcgggttcgtttattgggtgaaatggcgggtgtttttttagagtagggtatggtagagttagaaggcgagcgaggagattatcgggggaagaggagagcgtacgatgagcgtcgtcgtagggagcgcgttaaaatcgaaatttttcgttagtttcgttttatttatcgttttttttcgggacgagtttatagttttggttgagaggggaggcgggatttatattttgggtttgaagtttttttcggaaagtaggtttgggatgggaaattattgggttttagttaattttttatatttagcgcgtggggttaattttgaaggggagtttttagggcgtcgtttttatatattagaaagtcgttttttcgttaggggattttaatggattattttatttttttcgtttttcgcgcgtagaaggatcgttcgttattttattttttttatagttttaagtcgcgtggattttttttagacggtcggagtttttttttcgttttttttattcggtttcggcgtcgggttttttttcgttttaggaagttcgtttttttagttagcggtttcgattgtattggtttcgcggtagttttggtttaggcggttagcgttggatagcggtcggggaatttcgtgttgcgcggcgcggtcgaggggcgggtttggttcggagagtatcgcggtttcggttttttgtcgtgcgtttcgcgcgttttgtatcgttgagcgaagtagagacgtaaggaaatggtagtagagcgcggggcgagggtagaggggagttattttttttagagtttgggttggttgggttttcggtattttcggacgtgcgttaggtttttattttgaagacgcgttcgttttgggaatatgatttcggaagtagtcgtagtcgtcgtcggacgaggggcgtggagaggcggtgtttcggtagtttagggatggcgtaggttttggggttttaggaagacggcgtcgttggcgttttgagttttgttgtcgtttttggttgtttagtttttttgttttcgttttttttgtttgttttggtttttattttttcgagagtgtacgttaggttcgggttttgtttttggattgatttatttggggcggtatcgttcgtagttatgattttcgggttttgagtttagcggcgttttaagcgtcggaatcgtatttcggcgtcggtgatagttattgcgttcggggtcgttttttaagttgtgggtaagatatcgcgttcgatttttttttagtatcgagtgttagacgttgtagtgtttattcgatcggaggtagggagggcgttattattttattataggtttgggataatttaatagaaacgtagtgggaattttttggttaggagtcgaataaggatttcgggtcgtggtagtatagtttatagtgggggataaagtagtaattttttagatagttgttaataattttttttgagttgtaagtatttttttattttttataaaaatttgcgagttgaattgaatggttttgaatttttaaaattaaaaaagttgtggggtagttttagagtattattggggaaattttatattcgttgttatgtttttttatataggtttttttttttcggtttttttaattggttcgttttcgtagttggaatttttttgtatgaggttatggaatatatattattttttttggacgttaattattagttatagtttgaggatttttaaatttatgtttttagtaatacgattcgagttttgtaatttttcgattttattttgagttaatattattttgtttttttattttgttgaagtattttttttagttatttatttaaaatgtttatatgagagatatattatttgattttttgtttgtattaagatgtaatgattgtaacgattttatttttttagatttagataaaagtttcgttttatttatgaaattttttataattagtagtgatttttgttttattttattttttttaatatttattatattatttattagtcgttagttatatatttttattgtgtaattttttgatgtatatgtattttattttttatatgaattagagttataaatttttatgaattttttaaagtatttattttagtgtttatataaaagttatttgtttggtttattataatatttaatattaagtaggttattttttattttttgttgttaatttgtatatataaagtgtttattgttattttttagttgagtttattttagattaaaagagaaacggttataatttaattggtaaaaagtaataggattttgagttagtaagtatttaatagaacgttttttatgataatagaaatataatttgttatgaatatatattttaaatgtaagatattgtagttaagaattaaatatgttttaattataatttattttatagtttttgtttttttttttgagatagagttttgttggagtgtaatggttcgatttcggtttattttaatttttttttaggtttaagtaatttttttttttagttttttaagtagttggaattataggtatgcgttattacgtttggttaattttgtatttttagtagagatggggtttttttatgttggttaggttggtttcgaattttcgattttaggtgattcgtttatttcggttttttaaagtgttgggattataggcgtgagttatcgtattttgttttttatggtgttttttttattagattatagttattttattagttatgttgattaatttaattatttaagtttagtgttaatttgaattttttgaaaatgtaagttagtatttgaaaagtatggttgttttttttatttttgttattttggggattttttttttattttaataaagatatatattgttattattttatgttaggtgtattttaagtgttttaaaaaatattaattcgaggttaggcgtggtggtttatatttataattttagtattttgggaggttgaggcgggcggattatttgaggtcgggagttcgagattagtttgattaatatggagaaatttcgtttttattaaaattataaaattagtcgtatgtgatggtatatttatgtaattttagttattcgggaggttgaggtaggagaatcgtttgaattcgggaggcggaagttgcggtgagttgagattgcgttattgtattttagtttgggtaataagagtaaaacgacgtcgtaaaaaaaaaaaaaaaaaaaaaattggttgggtgtagtggtttatatttgtaattttagtattttgggaggttaaggtgggaggattgttttagtttaggagttcgagattagtttgggtaacgtaggtagattttatttttataaaatatatataaaattagttaggtatggtgggtggtaggtatatgtagttttagttatttaggaggtagaggtgggaggattatttgagtataggagttgggaggttgtagatagttattattatgttattgtattttagtttgggtaatagagtgagattttgttttaaaaaaaaaaattcgtttaattatgataattagaggaaataaattttttatttttattttatagatgaggatattaaagtatagagtgattaaataatttatttaagattatatagattataattagaaggaggttaaattataatttagatagtttggttttagaatttttgcgtttagttattgtgcgttgtagatttatatgttttttgttgagtttatggtaatttttttgtagttgttgatgttgagataaggttttattttgttattaaggttggagtataggtggtttttttattttagttttttagatagttgggattataggtacgtgtaattacgtttggttaatttttcgtatattttgtagagatgtaattttattatgttgtttatggcgggttttttgaatttttgggtttaagtaattcgttttttttggtttgtttaagtgttaggattataggtattagttattgtgtttggttttgtggtaatttaatattgattttgttattggttgtgtttttaggtttgggagagatgtttgtagtaaataagttaagtatttttaattttatagttgattatattattttttttgaaatatttttttttattttattggttgtttttttagtttttttggttttttttttttttttaatttgttattgtttacgataaaaatttttggagttttatttattttttttttttattttaggtttttttttatttaaaaatagtttttttttaggtagtatttaatgttttattttgttgggtttttttgtatagtatatattgttatgtaaaattatatgtatatttatttgattcgttagttgtttgttttttttattattatataatttttatgatggatttaaatttattttaatttgggttttagatgtttttttttaaaatttttttttgttttttgtgaaatttattaaatgttttttattttattttttttttttaatttagatgttttattttttagttttattattttaaataaattaaaatatatagtgtttaaaatataaaattaattaaaatgattgttttttggataatttaaggattttagattgttttaatattattaattttttttttgataaatatgttattattgtttagtgtattaaatgtattttttaattttaataagtattattattttattattttttatagttattaaaaaaatatttatttatgtttttattattttttttgttttttttttttattttcgatttttatttggattattgtttttttgtttaaattttttatggagaggatttttaatagatagttgagttgttttagttttttgtgagtttgaataaaatttttaaattttttttcgggggaatatgttttttggcgattattgaggaatggaagaattgaaaaaattaatggaaaattgttattattttttataattgaaggaatttatattttaatttagaatattttattatggaataaaatatttatt

SEQ ID NO: 41 - DNA, 11735 bp, Artificial Sequence
  chemically treated genomic DNA (Homo sapiens)
atttattttttaataatgttttagtaaaaaggttattattagtagaatttttttaaagtaatattttgtttttttttttaaaaaataatttttttttttttaattattaaagtaatatatgtttattgtagaataggaaaagtataaagaagatggagtagggattttttttttttgttttttatagttttgatttggtttttttgtgatttgggattcgtgtgaataggtgatgtgttgaggagttcgggatagggaatatgtatttttaggaagtgtttgttaagtagtttgtattttgattaataggattttgagtatagggaatttgtggaattttttaggagaagatatattagttggaatggaagtttgttttagtttggggatttttttaggattatttggggttgtttggaataggaatttttttatttatttgttttgtggttttaggtaagttatggtttttttatttggaaaatagtattaagtatttttaatttatttagttgtgggatatagtttttttatttttagtaatgtgtgtagtattggaatttttggtttattagtagaatgtatttttttttatatggggttttggggttgagtttattgtttataatagcgtagtgttttgggagagatttgagtttagattttgattttatttttaaatagttgttaagtttttttatatattttagttttaatttttttatttgtttaaaatgtatttgtgttatagggtagttgggaggtttcgataaaataatgtatgtaaaatatttagttgggtgtttacgtttaggaagtttttaggaaatgtgaattattattatttattttaggtttattttgtgtttggtattttaggggaggaaggcgtaaaagtgaaaataaagtttgggttttgtttttaaggagtttgaagatttgttgataggtagattaaagtaaaagggttttatgtattggagataggattagagacgtaagaaaattgttaatttttgaggttttttataaattaggttttatgttgaaagttttatatgtattatttatgagatttttttataattttatgaggtaagtgttattaggattagaaaattaaggattaaagattagagaatttaggaaattttgtttgggttatatagttaataaagtgttagggtttgggtttgaattttgggatgtttgattttagattttttgttttttttattttatttgagttggattttgaaggatgagttagatttgggtatatggggatggaggggaggaggggtttggaggggaggcggggtttgaagaataggaggatatggagttaggtaagtaaagtttgggagatgggaaagtgtagggcgtgtacggtagaaattttgagggttttgtgtgtgtgtgtgtgtgtgtgtgtgtgtgtgtatgtgtgtgtgtgtgtttgagatagggtttcgttttgtgatttaggttggagtgtagtggtacgattttggtttattgtaatttttattttttgggtttaagcgatttttttgttttagtttttcgagtagttgggattataagtatatattattacgtttggttaattttttttttttttgtatttttagtagagataggtttttgttatgttgattatgttgattttaagtttttggttttaagtgatttatttatttcggttttttaaagtgttgggattataggtatgagttatcgtgttcggtttgtttgtttattttgagatagttttattgtgttatttaggttggagtgtagtgatatgattatggtttattgtagttttgatttttttgggtttaggtgatttttttattttagtttttcgagtagttgggattataggcgtgtgttattacgtttagttaatttttttgtattttggagagatagagttttgttatgttgtttaggttggttttaaatttttgggtttaatagatttgtttattttggttttttaaagtgttgggtttataggtatgaattaatgtgttcggtttgaaattgtaagtatttagtttggttttatgtgagggttttttcgggtttattttatataaattttagttaaaatatattaagtatttattatgtatttgatatttttttaaggattttataattaatattttattaaggttttatagtaaatggagaggttatttgtgtcgtttttattttaaagatgaggaaattgagatttagaatggtttagtaatttgattatgattataatgttaggaatgaatggggtaggaatttaagtttagggaggtagattttagatttgtgttttatatttattgtaagaattagttagtttttaggtagtgaaattttaaagttagttttagttgttcgaaatttaattatagagagttggtttttagttttttattggtttttttttttttttttagttttattttgttatttttatttttttttttggttttggggttttgttgtttttttaaatttgttttgttataattttttttaggtttttttatttgtaaaatggggataataatagtgttcgttttagagtagtgttgtgaggattagaggaggggtttaaggtgtttagagtttagtgtatagtaggtttttaataaaaattagtgattatcgttattattgttatttaagtagtgtttttgaagtaatgtgaaattgattgagtgatagtattatttatatttgatggttgaggaaattgtggttaagagaagtgaagtagcggttgtttagtgttatttaattaggaagtagagagcgggatttatttaatttgggttttttgattttttgattttagattttattaattttttttattttttgtagttaggtagatgagtgaattataattagtatttattatttgttttttgtattttaagttaggttttagatgttaaggggtattttagagagatttgatttagatttttgaaggagtatagaatttaattgataaataaggtatgaaaacgaagttttgttttgttgaggtagaatatattaagggttttaagagggtaagagttattttggttgagaggaagtaggtaggggaggttttttggaggaggtgagatttaagttggtttttaaaggattaaaaaggattaatgagatacgtagattagagtaaaagggttttatgtattggagataaggttagagatgtgatcgggagcggtgatttatatttgtaattttagtattttgggaggttaagtagggcggattgtttgaggttaggagttcgagattagcgtggttaatatggtgaaattttgtttttattgaaaatataaaaattagttaggtatggtggttggcgtttgtaattttagttattcgggaggttgaggtaggagatttatttgaatttgaggtaggagaattgtatcgttgtattttaatttggtgatagagtgagattttgtttaaaaaaaaaaagttagagatataataatagttgttaatttttgaggttttttatgatttaggttttgtgatgaaagttttatatgtattattttatgagatttttttatgattatatgaggtaagtgttattaggaggagaaaattaaggattaaggattagagaatttataaaatttgttttggttatataatgaataataaagtgtttgggtttgggtttgaattcggggttgttggttataaagtttgggtttttaattattatgggttattgttattttggttttaattatttaatgaggaattaagttgtggattgtttttggagggttttgaatgttaaggtttagatttgtataaaaattatatagtattaggtaagaaattagatttgaaatttagtagtagtttttagtaattttttattatttattatttaagtttgtttttttgagtttttttaaatcggagtgatgaggaatgtattattagtaatgaaggtttttgaatgaggtagagaggtttttgtgataaaaggattgtttaaaagaaatttagagatgtttaaatatttattgagtattgggttttaataatataattgtgaataagataaagttttgtagtgggattttgattttgttgtgtttttaggtagtttgggagagtagaagaattttttaattggaaaaataagggttttagagttgggatttgttttagattttgttgttagtttttaaattagggaatttttttgtatgattttgggtaagttatttagttttttagattgttagtttttattatggggattattatttttttttttaggattgttggaataaattaattaaaataacgtttgtaaggatttagtatggtgtttggtattttgtaggcgttgaatagatgttagttttttttataaagaagtagattagtttgttttcgttttttatttttttgttattaaagggaataggtttttggtttttattttagtaggaaaggggatatgaatgtatatgtgttagttaagtaataatgtaaattaataaaagggtttgtggtttggggaatatattgttgggtttgggtttaggttgggatttcgcgttaaaatgtttttttttaattttagggaattcgggtttatttttcggggcgttgtgtattgttttggtcgtttttgtattgtgaatttcggaattattttttgttttcgtttcgtcggttgttaattagcgcggtcggcggttggcggtattaatagtaggtgtggttgtttttttaagtagcgaagttagtgttgtaatcgtcgtttcgaggacgcgtttttttcgggggggggggggggggtggagtttgtattgtcgtagtagttaatcggagcgcggtatttttcgcgggagattcgaatttcgcggtacgacgtttggcgttaaaaaaaaaaaaaaaagaagaaaaaaaagaggtagagaaagatttaaggattagagagcgagtcgtaaggaagtcggtgtagtcgagatttttttttttattttagcgtatcgcgttttcgtcgagtttgagggtacgtcggggatttttttttagagtcggtcggattttaggtgtcgaggttttggggagcgcggggcgtttcgggtcgcggtgttttcgggacgagatagtttttggtagtgttattatcgtagtcgtcgggcgatttttaagcggcgatttttaagcgttgttttttgttcggtcgcgggttaggaggggagggttcggttttgtttcgtaggcgtttattggcggtttttttcggttttcgcgttatgtcgcgggtcgtgtgaaaggcggtagtatcggaattcgtaggtgttcgcgggcgcgttaagtttttttgggtagggggcgttttattcgttatgttgtaagggtttcgggttttggtttcggtcgttgggtagatttcgaaggtggtgttcgcgatgagttttatagagttgtggttattcggttttagtagtttttagttttgtttagttattgttatttattatatatcgttgtattcgtagacggcgtttttcgtagcggcgttaggtatttgtttcgacgttattttttacggattcgagggttaagttgtgcgatgtttgtcggtaggtcggttgtcggtaatgttgggggtttttatcgtttttttttatgtttttttaggtgtgggaaaggagggaggggtgtttgagatttagtttgagtggagtaggtagagttttgggaagagggaagatgagtttttagtttttaggatttagtgtttttaatatttgagtagaagatttttttatttttagattttggatgaaataattttatttattttagtggagtggaatgagtattggattgcgagtttggagggagatttaatttattatttttagtgtattgtgtgattttggggaagtttatgtagttagcgttgtcgttatttatttattattttattgtttggttagaaattagtattgggtgtttgttattgtttaggtaaagagtatggtttggggatattgtgggattttggtaagatagagggataggtttagtgggttttttatatttaatttgttatggatagattttaaattgtttagttagtttttgagatagttttaagtatttgttttaggtttttttttaggtttagtttttttttttagatagttatgtagtagatataaatgtgggtagtttttttgggttttgtttagattggttgttttttttttaagtttttaggttcgttgttagagagggtttaaagtgtagtggtattaggttgtttgttgatttgggtttagggtgtgttttgtgggagtggaatttttggagttcgtgtgaattaaaataattttagggtggggggtggagtgggaaaagtttgggggagtggaggtggtggtggttgaggagtttggtttttggtgtgattttgttattaattttttgtgtgtttttggataagttttggatttagtttgggttttagtgtttttttttttataatgcgtgtgtgtatagggtggttgtggggttagttttttttagttatatttagttttaggttttgggttttggaagtaggttttagggagaggaagggggtgttgtaggtttgtttagttgtgagtttggtgaataagttcgggtatagggataagattattttttattgttttagaggtatttggttagatttgtgttagttagtaagtacggatgtttagttagttttggatgtaggtagagttattattttttgttagtggatttaggttttgtttatgtttaaaacgttaatttttttggagattttttttgtatatgatttttaattaggagggtagtgggtaggaatggtattatttttattttataggttaagtaatcgaggataattgggattgggtattttgtgtttagtgttttatagtttaaaatatttttgtagttcgtgaaatagatggtattaatagttttatgttatagggggaaattgaggtttagagaggggatgtgatttaaggttagagatggggatggggtagagtgatgggatttataaggtagttagtttttttgttttttattttttattttttgtagagataggggtttttttatgttttttaggttggttttaaatttttgggtttaagtaatttttttgttttagttttttaaagtgttgggattataggtatgagttagttattttaatgtatttggttaggtagtaggtttttttttatgtagttttgattttttttaatattgtttaatttaggagttgagttttttttagggaagggagttttgcggtaggtttatttttttttggttagttgtttttagattggaagttttagtaatagttgtggttttatattgttttgaatttttttagaggagtttaagtatatttgtttgtattttttttttagaagggtttagtgattttagtaagaaggttttttttttattgagtgtttttcgtgtgttagatattgtttggtattttttacgtttattattttggttaggatgtttagaatgaggtattttgtagataaggaaattgagtaaagaaaggaagttatttgtttgggttataagtgaagaagtaggggagtttttttgtagtagattattttaaagttttgttaggtttagagttttcgtttttgttaatttttagatgttcggggtttagtttcgtgggtaggtttgttttttgtttatttattttataagggcgtgatttggaatagttttaaatttaattttgggtgtggtcgtttgttttgtggtcgggttgtaaagtgtagggtgagtaggatttgttgtggagtttttgtttaaagggattttaggtattgtttaaggatggtaattaagtttaatggtagaatgaaggttataatttagattttttggttttttgtttagagttttttttaagttttttgaggaaggtttagggaatgtttttttatcgtatgttttttttggttaggcgtatggtattatttttttttacgtttgtaggaagttttgtttaggttggtttgtaatagcgttatttttgtttattgtaaattttattttttaggtttaaatgatttttttgttttagttttttaagtagttgggattattttttgtatttttagtagagatggggttttattatgttggttaggttagtttcgaatttttgattttaggtgatttattcgttttggttttttaaagtgttgggattataagcgtgagttattacgttcggtttttttttttttttaatttgtttatattttttagatttttttttgtgaggtatgaaagaaaataaatattttaatatataattttataaggtaggttaggtgaggaggtgtaggtttagagaggtaagatagtgaattttaggttgtttagttacgaagtggtagagttgggatttgaaagtaaggttcgattttttatatttgtttttatttttattatttgatttagggtttaggagagattaggttttattttgcgtgattttgggtaagttaattttttttttttaagttttagtttttttatcgtggtgttcgtaagggggttgtgtttggtgatttttgattttttgtatttttgtagttgtttgaggaaggagttgtatttttttttataggggttggtagggtgggtttgcgttttgattaggttttgaagatttagttaaaggggttgtttaagagcgtttaggatagggttaagttggtttttggttgtggttatagtttttgtttttttttttttatcgtagtttttttttagtttatttttgaatttttttttttttttattggtgttttttatatattagtgttagtagttttttggtgggggtattttttatgggtaaagcgttttgttgtattattttattgaatttttagtataggtggagataatgatgtttattttataggtgatttgacgttaattgattttttagttaagaaggggaaggtttagatgtaaagttaggttagtttgattttaagatttgtgtttagttttattttgatgttgatttttttgggtttgttttttgttatttgtgttttgtaggtttagtttaagttataggttgatttttttttgggtattgtttaaaggtgttagggaggtatttttagggggatatttgtcgtattgggattttgggagtgtagaataagggtgaaggagagtgagaaaagagagaaggttgtgtgtgtgtgtgtgtgtgtgtgtgtgtgtaagtatatgtagtgatgggggtaggtgggcgtagtttaggttttggtttaaattttagtaaattttggggtagcgtgtgtgggatgtagttgaggtagtttggtatatggttttgtagttagataggtttgggtttaaattttggtttcggtttttgtgtgattttgggtatgtgtttattttttgtaagtttttattttttggttttcgagagttagtgttaatattgatgtggtaggattgttacgagtatgtaataggtttagtatagatattttgtttaaggtttttttgggattttttttggtttgttttggcgggggagataggtgtggttggggaggttttgggttgttttatttttgttttaggtagaattttatttgagtttttttttttttttttgtttttggtgtttttgttgggggatatatgaagaatattaggatgtgtagttttggttaggattgatggaggtttcggagttttttaagttttaattattttagttgtataatggggattagtggtatgggaagatttagtgaagtgatgaatgttggggcgtggtttagggtatgtggaaggttttagttagtgattggttttttttttagtgatagtatggggttaaatttttagaatataggattttattagttaggaaggtagaaaaggaatatttaagagatttatttaagaatgagtagtaaagtgtttggatggtttttaggtttcggtagtggtggaaagtaagagtgttatatttaggttttttaaattaaggagtagggttttttatattagtttaggaagattttttggagggggtaggagtgggggaaggggaattgatagtaggaagagttgttattatttttaatatttgttagtttagttgtgtttagtagtagttagaagttttagttttgttgagtatgattttattattaaatgttaaaataggtttttttgtttaagttagggtaggggtgtttgggggatttagagttggaaagaggaaagaaatgggttcgatgatttttagaaggatgtatgaaggaagaggtcgagattagattttagggaagggattttgtgttttttgaatatttattgtgtgttgagatataggttgagaattttatagaagttaaaggagtaggagttaattagggttttttttttatatgtagatagggagttaaataagtgttttaaagggaagttacgcggggattaatttagtttgttttagggtttttaagatgtagaggttgtttaggtagtgttttttttgaatttttataatagttttttgaggtaggtatttttattttatttatagaggaagaaattgaggttttttagatgtgtaatattttttttaatttgtatcgtgagtttgcgaaggagttggagatttaagtatgggtttttgatttatgttttagtgttttagtgttttagttttgtttttgttttgtttttgtttagttttaattaggagagaggtttttttcgggttagtgtagttttgggtttaattggggttcgggtggtaatagggtggagaggagtagatgggtttgtggtttgatttttttagtaggtgttttttaagtttggcgggaatagaaagggggagttggagggggggggtggttttagttgtttgtttttaagatacgggaaggatttattgtttgtttttttcggtaaagaaagaatggtaaatgtagtttatttaggaggttttggggtttttaagttggagtttaaatatgggggtggggatgtttgtattgttttttattgtgggtatttttttgggttgtggtattgagttaggaagttttttgggtttgggcggatgtttagtttcgttttgataaggattagttgtgggattgtgatgggtatttagtttagttgggttagttgtttttgtaggggggttttttttttattttgatgtggtttaggttttatttattgtttttttttggtattattttttgggtgtggtggggtgaggagtaggtataggagtcggtttagggttcgtggttaaggagttttgagtttttggttagattggttttggtagggttttaagtgtttgggttttagaggatgggagttttatttgttttttagaaaataagattttttttgaaagtttattttttaggttattgatgtttttttattaagtatagtagtgttttattaggattggcggtaaattgaggtatagaggtggttgttaagtggttttattgttttggttttatattagggaaaggttaaaggaggaatgatttttaaattttgttttttttttttttttttttttaagg

SEQ ID NO: 42 - DNA, 11735 bp, Artificial Sequence
  chemically treated genomic DNA (Homo sapiens)
ttttggagaaaagggggagagagaggtagagtttgagaattattttttttttagtttttttttgatgtggggttaaagtaatgaagttatttagtagttatttttgtgttttagtttatcgttagttttggtgaagtattgttgtatttgataggaaaatattagtgatttgagaagtgagtttttaggggaaattttgttttttgaagggtaaataaaatttttattttttgaggtttaggtatttgagattttattaaagttagtttggttaagggtttagagttttttaattacgggttttaagtcggtttttatatttgttttttattttattatatttagaggatgatattaggaggaagtagtgggtggggtttaaattatattagggtggggaaagggtttttttatagaagtagttggtttagttagattgagtgtttattatagttttatagttggtttttattagggcggggttgggtattcgtttagatttaggggattttttggtttagtgttataatttagggaggtgtttatagtgggaagtagtgtaaatatttttatttttatgtttgggttttagtttgagggttttagggttttttgaatagattgtatttgttattttttttttgtcgagaggggtagataatgaatttttttcgtgttttaaggataagtagttgaggttattttttttttttagttttttttttttgttttcgttaagtttgggaaatatttgttggggaaattaaattatagatttatttgtttttttttattttgttgttattcgggttttaattaggtttagagttgtattggttcggaaagggttttttttttggttagggttgggtaggggtagggtaggggtagagttggggtattgggatattgggatataggttagagatttatgtttgaatttttagttttttcgtaggtttacggtataagttgggggaaatgttatatatttaaggagttttagtttttttttttgtaaatggggtaaaaatgtttattttaaggggttattgtaaggatttaaggaaggtattatttgggtagtttttgtattttaaaaattttggaataggttgaattaattttcgcgtggtttttttttgaagtatttatttagttttttgtttgtatgtgggagaaagattttggttagtttttgtttttttaatttttgtaaagtttttagtttgtgttttagtatatagtaggtgtttaggaaatatagagttttttttttaaaatttaatttcgatttttttttttatatatttttttgggggttatcgagtttattttttttttttttttaattttggattttttagatatttttattttggtttggatagagaggtttattttaatatttagtggtgaggttatgtttagtagggttgagatttttaattgttgttgagtatagttgggttgataggtgttggaggtggtgatagttttttttgttgttagtttttttttttttatttttgttttttttaggaagtttttttgggttgatgtgaggagttttgttttttggtttgaggagtttggatataatatttttgttttttattattatcgagatttggaaattatttaaatattttattgtttatttttgaatgagttttttgaatattttttttttatttttttaattggtgaaattttatattttagagatttagttttatgttgttattagagaaagggttagttattggttgagattttttatatgttttgaattacgttttaatatttattattttattgaatttttttatattattaatttttattgtatagttgaagtaattgaggtttggggagtttcgaggtttttattaattttgattaaggttgtatattttagtattttttatatattttttagtaggagtattaagggtagggagaggaagggaagtttaggtggagttttatttgaggtagaggtggggtagtttagagtttttttagttatatttgtttttttcgttagaataaattagaaagaattttaggaagattttgaatagaatatttatgttgagtttgttatatgttcgtaatagttttattatattagtattggtattggttttcggaagttaaaaaatggagatttatagagagtaagtatatgtttaaggttatataaaggtcggagttagggtttgaatttaggtttgtttgattgtaaagttatgtattaggttgttttagttgtattttatatacgttgttttaggatttgttagaatttgggttaaggtttgggttacgtttatttgtttttattattgtatgtatttgtatatatatatatatatatatatatatatagttttttttttttttttatttttttttatttttattttgtatttttagggttttaatgcggtaagtgtttttttaaggatatttttttgatatttttggatagtgtttagaggaaagttagtttatggtttgggttgaatttgtagaatataggtggtagaggataagtttaggaggattagtattaaggtgaggttgagtataggttttggagttagattggtttggttttgtatttaggtttttttttttttagttgggaaattagttgacgttaagttatttataaaatgggtattattgtttttatttatgttgaggatttagtgagatagtgtagtaaagcgttttgtttatagggagtgtttttattagggagttgttagtattgatgtatggggagtattagtgggaaaaggggaaagtttaagggtgagttgaaaagagattgcgatgaggggaggagagtaaaggttatggttatagttagaggttagtttagttttattttggacgtttttaggtagtttttttggttggatttttaaggtttggttaggacgtaagtttattttgttaatttttatggagaagagtatagttttttttttaggtagttgtagaagtgtagagggttagagattattaggtataatttttttacgggtattacggtgaggaaattgggatttggggaagaggaattgatttgtttaaggttacgtagagtggagtttggttttttttaagttttaagttagatggtgggggtaggagtaaatgtaaggggtcgaattttgtttttagattttagttttgttatttcgtagttgaatagtttgggatttattgttttgtttttttgagtttatatttttttatttgatttgttttgtagagttgtgtgttaaaatgtttatttttttttatgttttataagaggaaatttggaaaatgtagataaattgaaagaaaaggaggatcgggcgtggtggtttacgtttgtaattttagtattttgggaggttaaggcgggtggattatttgaggttaggagttcgaagttagtttggttaatatggtgaaattttatttttattaaaaatataaaaagtaattttagttatttgggaggttgagataggagaattatttgaatttgggaggtggagtttgtagtgagtagagatggcgttattgtaagttagtttgggtagagttttttgtaggcgtgaaagagaatgatgttatgcgtttggttagaggaggtatgcgataaaggggtattttttgagttttttttagaggatttggaaagagttttggatagggagttaggagatttgggttgtggtttttattttgttattgaatttggttgttatttttggatagtgtttgaggtttttttaaatagaagttttataataaattttgtttattttgtattttgtagttcggttataaagtaagcggttatatttagggttgggtttggaattgttttaggttacgtttttgtaaaatgagtaagtagagggtaggtttgtttacggggttgggtttcgggtatttggggattgataggagcgggagttttgggtttggtagggttttagggtggtttgttgtaaggagatttttttgtttttttatttgtgatttaggtaagtgattttttttttttgtttagtttttttatttgtaaggtgttttattttggatattttgattaagataatgaacgtgaagagtgttaagtagtgtttggtatacgagaggtatttagtaaaagagagatttttttgttaagattattgagtttttttgggagggaggtatagatagatgtatttgggtttttttgggagggtttaaagtagtgtaaaattatagttgttattgaaatttttagtttgaaagtagttggttagaggagagtgggtttgtcgtaaagtttttttttttggggggagtttagtttttaagttaggtagtattaaaaaaagttaaggttatatagagaagagtttgttgtttgattaggtgtattagagtagttagtttatgtttgtaattttagtattttgggaggttgaggtaagaggattgtttgagtttaggagtttgagattagtttggggaatatagggagatttttgtttttataaaaaataaaaaataaaagatagaagagttgattgttttgtgagttttattattttattttatttttatttttgattttaggttatattttttttttgagttttagtttttttttgtaatatggagttattaatgttatttattttacgaattataaagatgttttaggttataaaatattgaatataagatatttaattttagttattttcggttgtttaatttgtaaaatggggataatattatttttgtttattgtttttttagttagaaattatgtgtaggaagggtttttaggaaggttaacgttttgaatatgggtaaagtttgagtttattggtagggagtggtggttttgtttgtatttagagttggttgggtattcgtgtttgttgattagtataggtttgattagatgtttttggggtagtggggggtggttttatttttgtattcgaatttatttattaaatttataattaagtaaatttataatattttttttttttttttggagtttgtttttaaaatttaggatttggagttgaatgtggttgagaagagttagttttatagttattttgtgtatatacgtattgtgaaggagagaatattgaagtttagattgggtttaagatttgtttaaggatatatagagaattagtggtagagttatattagaaattaggttttttaattattattatttttatttttttaggttttttttattttattttttattttaaagttgttttgatttatacgggttttaggaattttatttttataaaatatattttgagtttaggttagtaggtagtttggtgttattatattttgggttttttttggtaacgagtttgggagtttgaggagagagtagttaatttgaatagaatttaagggggttgtttatatttgtatttgttatatggttgtttgggagggaagattgggtttgggggaggatttagggtagatatttggggttattttaggagttggttggataatttggagtttgtttatggtagattggatgtgagagatttattagatttatttttttgttttattaaagttttatagtgtttttaggttatattttttgtttggataatagtaggtatttagtattggtttttggttaaataatgaagtaatgaatgaatggcggtaacgttggttgtatggatttttttaaggttatatagtgtattgggagtagtgagttgggtttttttttagattcgtaatttagtgtttattttattttattagaatggatgagattattttatttaaagtttgaaaatgaaggggttttttatttagatattgggggtattgggttttggaaattgaaagtttattttttttttttttaaaattttatttgttttatttaaattggattttaggtatttttttttttttttttatatttggaaaagtatagggggaagcggtgggggtttttagtattatcggtagtcggtttgtcggtaggtatcgtataatttggttttcgggttcgtggggagtggcgtcgaggtaggtgtttggcgtcgttgcgggaggcgtcgtttgcgggtatagcggtgtgtagtaggtagtagtagttgggtagagttgggggttgttgaggtcggatggttatagttttgtggggtttatcgcgggtattattttcggggtttgtttagcggtcgaagttaaggttcggggtttttgtagtatagcgagtaaggcgttttttatttaaaagggtttggcgcgttcgcggatatttgcgggtttcggtgttgtcgttttttatacggttcgcggtatggcgcggaggtcgggggaagtcgttaatggacgtttgcggggtaaggtcggattttttttttttggttcgcggtcgagtagagagtagcgtttagagatcgtcgtttggagatcgttcggcggttgcggtggtggtattgttaggggttgtttcgtttcgagggtatcgcgattcgggacgtttcgcgttttttaaggtttcggtatttggggttcggtcggttttggggaggggttttcggcgtgtttttaagttcggcggagacgcgatgcgttgggatggggaggggggtttcgattgtatcgatttttttgcggttcgttttttagtttttgagtttttttttgttttttttttttttttttttttttttttttttagcgttaaacgtcgtgtcgcgaaattcggatttttcgcggaaaatgtcgcgtttcggttggttgttgcgatagtataggttttattttttttttttttttcggaaagaacgcgttttcgaggcggcgattgtaatattagtttcgttgtttaaaggggtagttatatttgttgttggtgtcgttagtcgtcggtcgcgttagttagtagtcggcgagacggagatagagggtggtttcgggatttatagtgtagaggcggttagagtagtgtatagcgtttcgagaaatgggttcggattttttgggattgaagggaaatattttggcgcggggttttagtttgagtttagatttagtagtgtattttttaggttataggtttttttgttagtttgtattgttgtttagttagtatatgtgtatttatatttttttttttgttaaaatgaaggttaggaatttgttttttttaatggtagaggggtgagggacggaggtaaattagtttatttttttgtagggaaaattaatatttatttagcgtttataggatgttaggtattatgttagatttttataagcgttgttttagttaatttattttaataattttgggaagaggaatgatgatttttatgataaagattgatagtttgaaaggttgggtaatttgtttaaggttatatagagagattttttgatttgagagttggtaatagaatttgggataggttttagttttggagtttttgtttttttagttaaggggtttttttatttttttaagttgtttgggggtatagtagggttagagttttattgtagagttttgttttgtttatagttgtattattaggatttaatatttagtaaatgtttgaatatttttaggttttttttaaataatttttttgttataagagtttttttgttttatttaaaaatttttattgttgataatatattttttattatttcggtttagagaggtttagagaagtaaatttgggtagtgagtggtaaaaagttgttagaagttgttgttagattttaggtttgattttttgtttggtgttgtgtgatttttatgtaagtttgagttttggtatttaaagttttttagagatagtttatagtttaattttttattagatggttgaggttaaggtggtaataatttatgatgattaagagtttaggttttgtagttaatagtttcgaatttaaatttaggtttagatattttattatttattgtgtgattaaggtaaattttgtaaattttttgatttttgatttttgattttttttttttaatagtatttattttatatgattatgaggaaattttatgagataatgtatataaagtttttattatagaatttggattataaggagttttaagaattggtagttgttgttatatttttgattttttttttttagatagagttttattttgttattaggttggagtgtagcggtgtaatttttttgttttaggtttaagtgagttttttgttttagtttttcgagtagttgggattataggcgttagttattatgtttggttaatttttgtatttttagtagaggtagggttttattatgttggttacgttggtttcggatttttgattttaggtaattcgttttatttggttttttaaagtgttgggattataggtgtgagttatcgttttcggttatatttttgattttatttttagtgtataagatttttttattttagtttacgtattttattggttttttttggttttttgagggttagtttaaattttattttttttaagaagttttttttgtttgtttttttttagttagaatggtttttatttttttgggatttttagtgtgttttattttaataaaataaggtttcgtttttatattttgtttattagttaggttttatgtttttttaagaatttaggttagatttttttagaatgttttttagtatttagggtttggtttggagtgtagaaggtaggtaataaatattgattatgatttatttatttgtttggttgtaaagaataggagaagttaatgagatttgaagttagaaagttaggaggtttagattaagtaagtttcgttttttattttttagttaagtgatattggatagtcgttgttttattttttttaattataatttttttaattattaaatgtggataatgttattatttagttaattttatattattttagagatattatttaaatgatagtggtggcgatgattattgatttttattgagaatttattatatattgggttttaagtattttgagttttttttttgatttttataatattgttttgagacggatattattattatttttattttatagatgagggaatttggaaggaattgtggtagagtaggtttggggaagtagtagggttttagggttagggagggaaatgggggtggtagggtggagttgggagaaaagaagggagttagtgaggggttgagagttagttttttgtggttgagtttcgggtagttggggttggttttagagttttattgtttgggaattgattaatttttgtaataggtgtggggtatagatttgaaatttgtttttttgagtttgaatttttgttttatttatttttagtattgtgattatggttaggttgttggattattttgagttttaatttttttatttttgaaatggaggcggtataagtgatttttttatttattgtgaggttttagtaaggtgttggttataaagtttttagagaaatgttaggtgtatggtaggtatttaatatattttggttaaggtttatgtgaaatggattcgaagaggtttttatatggaattagattaaatatttgtagttttaggtcgggtatattggtttatgtttgtgaatttagtattttgggaggttaaggtggatagatttgttgagtttaggagtttgagattagtttgggtaatatggtaaaattttgtttttttaaaatatagaaaaattagttgggcgtggtggtatacgtttgtaattttagttgttcgggaggttgaggtgggaggattatttgagtttagggaggttaaggttgtagtgagttatgattatgttattgtattttagtttgggtgatatagtaagattgttttaaaataaataaataggtcgggtacggtggtttatgtttgtaattttagtattttgggaggtcgaggtgggtggattatttgagattaggagtttgagattagtatggttaatatggtaaaaatttgtttttattaaaaatataaaaaaaaaaaaaattagttaggcgtggtggtgtgtgtttgtaattttagttattcgggaggttgaggtaggagaatcgtttgaatttaggaggtggaggttgtaatgagttaagatcgtgttattgtattttagtttgggttatagagcgagattttgttttaaatatatatatatatatatatatatatatatatatatatatatatatataaaatttttagagtttttgtcgtatacgttttatatttttttattttttaggttttgtttatttggttttatatttttttattttttaggtttcgttttttttttaggtttttttttttttttatttttatgtgtttaaatttgatttattttttaaggtttaatttaaatggagtggaaggagtaaagaatttgaagttagatattttagggtttaaatttaggttttgatattttattagttgtgtgatttaggtaaaattttttaaattttttgatttttgatttttgattttttaattttaatagtatttattttataggattgtgaagaaattttatagataatgtatataaagtttttagtatggaatttggtttataaggagttttaagaattggtagtttttttacgtttttgattttatttttagtgtataagatttttttattttaatttatttattaataaatttttagattttttgggggtaggatttaggttttgtttttatttttgcgttttttttttttgagatgttaggtataaagtaggtttgaaataaatgataatagtttatattttttgagaattttttaggcgtaaatatttagttaggtattttatatatattattttgtcgaaattttttaattattttgtaatataggtatattttggatagatgaagaaattgaagttgaaatatgtaaaggaatttgataattgtttgaagatgaaattaggatttgaatttagattttttttaaggtattgcgttgttgtgaatagtgaatttagttttaaaattttatgtgaaggagggtatattttgttaatgaattaggggttttagtgttgtatatattgttggaagtggaaagattgtgttttataattggatgagttggggatgtttagtattattttttagatgaggaagttatgatttgtttgaggttatagagtaggtaagtgaggaagtttttgttttaggtaattttagatagttttggaaaaatttttaaattaaagtaaatttttattttagttggtgtatttttttttgaaaaattttatagattttttgtgtttaaagttttgttaattagaatataaattgtttgatagatattttttgaaggtatatattttttgtttcgggttttttagtatattatttgtttatacgaattttaaattatagagaaattagattagagttatgggaaataagggagaaaaatttttgttttattttttttgtgttttttttattttataataaatatgtattattttggtgattggagaaaaaaaagttgttttttaaaaagagaaataaggtattgttttaaggaagttttgttagtggtaatttttttattggaatattgttggaagatgggt

SEQ ID NO: 43 - DNA, 12405 bp, Artificial Sequence
  chemically treated genomic DNA (Homo sapiens)
  unsure (7895)
tttttttaaaagtttatataaagtttatttaaaaatttttttttaaaaatttaaagtttatgtattttaaaaatattaaatatagtagtagttagtttggagtgataagacgatttatgtagattttttaaggagagatttttttgtggtagagtagtgattgggaattgaaatatgcggtttttggagggagcgttttgcgtttttaaagtaagttatttatttttttatatttaatttttttattgatttggtagtttttatagatttattgaaaatatatagtggttatttttaggaattattttttgtttgtttttattttaagtaattttttatttttttattttttataatattttgtttattttaggtattattttattttttaaattttattttataaagtgttggttataattttagagttttagatatgtatgtaattttttgttattgtttattattttttaataataagtggaaattaagatttttttgtttttttaggttattttatatatttgatatgaaattttttgtagattattgttatttgaattgtttttttaatgtagttatataatttggaaatttttggttgtgtattaaatttatttaaagttatttgaaattatataagtttatttaaaaatgttttattataaatgtatttatgaatatgtagttaatgttaaattttattttgattatttattagttttgtggatttgtttttagtataatagggagaatattaaagttgttatgagtattaaattagataatgtttttgtaagattttattatataattattttgttattggtttataaaaggttttttttaattgtggattgaaataaaatattttgtattaatatttaaagatataaattatttttaatagtgtttaaaattaagtaataattagtttaaattttattatgaaatagattaatataaagtattatgtggtttagttgaaagtaagtttttttagtttttattttaatttttattaaaataagtttattgtattttaaggtggggtaataaaagtaaaattttattttaaaaaaaaaaaaaaaaagttagtttgttattattaataaataagtaaaattttgttggatttttttaaatatttaattattagattatgataaaattgtgtatattttaaattgattttgaatttttataaaaatggtatttgtgaaattttataaatgttagatattataagtttaatgagttgtggattaagaaattattttgttttgaaatatttaagtttttttttttagttttgaattagttaaggagttgtatttttaaaatgtatttaaaaaaagaaaatttaattaggggtatataaataatattataattgaaaatagtatttatttaattaattagcgtaaattgaatttaatgaaggattattgttatgtatttattatttttataggttaatgaaatatagtttagtttaattggatttttttttttttttttttttttaggatagatttttattttgttatttaggttggattgtagtggtaggatgataggttattatatttttgattttttgggtttaagtgatttttttattttagtttttttagtggttgggattataagtgtgtattattacgtttagttaatttttgtagtttttgtagaaatggggttttgttatgttgtttaggttggttttgagtttttgggtttaggtaattttttttttttagttttttaaagtgttaggattatagataggcgtgagtgtttagttaggcgtgagtatttagttagttttgatttttgttggaaataatttttaagtttttgttagaaatggtataaagaattgatgtaggaatttatagttttttgagagttattttttttatagttaaaaggatatagaaataaaagttaaattataaaattgattaatattatgtttttaaatattatttgtattataatttttaaaaaattatgttttttagtttttttaaaaaatagaatttttaaaaatatttagtaatatttaaaaaatttttgtattattaatttttgttttttgtcgatttttaggaaaaatatatattgtattattttttattgtgttatttggcgttttttaaagaatgattatgttgtgtatgagaattatttgaattgtgaaaaatgtggatttataggttatatttttatattaaatgttaatttgatttttggggtttggatttaagtatttagatttttaataaatattgtagatgatttttttttttaaggtttgggaattattggtataagcgatttttagttttttagatagatataagattttgaatgttaattaaaatggttgttaatttgtgaataatttttaattgaattttaggtaatttaaagagataaaaaatttattgtgaaaaatataaataatagtgtaaaataaattgttaattgattttttagaattattaataatataattgttttgtagaaaattttttaaagttgaaatttaaaaaatattgtttttaaaaattattaagatagttattataaaatatgattatatgttatgggatgaattatatttttttaatatttgtatgttgaaattttaattttcgggtttttgggaggtgattaggtttagatgaaatcgtgaagattgagtttttagatggaattagtgtttttataagaaatttgagagtttatgttgtttttgttttgtttgtttttttttttttttttgttatttgatataatgagaaagttataatttgatagttaagaagggggtttttattataatttggttatggtagttttttgatcgtcgatttgtagtttttagaattgtgagaaaattaattttcgttaagttatttagtttatggtatttttttaaattaagatattatagaagtgtaagttttaaaaatattaatatatttagtgttattaatttttgtttttgtatatataatataatgttttgttataaagttaaaaataaattagaatttttttaatttagtatgttttaagaaatattatttgataataattaataaaataaatttgtaaaatttgttaatgatgtgttttatgttaaattaaataaagatagttttttttggataggttgttggaaaatggttgtattaattgaattttttatgttttattttagatttttaattttaagttttgtttatagatttgattaaaataaaggttattatgaataggttattaataaaggttataaagttttgtgtttatgatgtgttataaatggtgtgtttagttttattagttaatgttgttgtatttgatgtcgttttagtgattttttttgttagtttattgttatttaaaattaagtaaaattttttttgtatgaaatttttttgattaattattgttatatagaatttttatttatttaattttttttttttttatttgagatagagttttgttttgttgtttaggttgaagtgtagtggtggtatttcggtttattgtaatattgtaacgtttgttttttgggtttaagagatttttttgttttaggttttggagtagttgggattataggcgggtattattatttttcgttaatttttgtatttttagtagagacggggttttattatgttggttaggttggtttcgaatttttgattttaaatgatttgtttgtttcggttttttaaagtgttgggattataggcgtaagttatcgcgtttggttttattcgtttaatttttattgtttattatatttaaagtgttgagtgtgataataagttatttaaaatttagtttggatttttaagagtttgtaatataatgaggaaaaaattttaacgatttttttttatttagatttttataatgttatttgttattaatagtttggaatattattgaagtttaagggtttgtggttatttaatattttaaatataatataatttggtttaaataagatattaagaattttggttaagaattttggttaaatataggagatttggaatttaacggtatgtttttggtaatttataatttttttttttatacgtttttttatgtagaaagtaaaggttttggaaaggattgatgaaaattaattttaaaattttacgatgtttttttttgtatttcgaatttaaaagggtgagttatgaagtaaaattttgtatttggtttaagttattgaaatatttgtaaacgatgttagagttcgaaaagagtaaagatagtagaaatcgtttagagaaagtaatttattgttgaagttttgtaaatttgagtagttaattaattttatcgtttataaacgtttggtcgttaggtattgtgattttttgtttagataaaagttttttttttttttgttttttttttttttttttttttgttttgtcgcgtgagattattatttttcgggttagttcgcgaacgttagggaggcgagtgtgaaatatacgcgttaatattttttttttttttcgtgcgttttttttttttatagaaaaatgtgtttttaggtaacggcgggcggcggcgttattttttgttatttaaatttaggtttttatttttcgtagtttttttttttcgtttttattttttttttttcggtcgtgggttttatttacgttttttcgggtttggggagggggcggaggttcggcgtgataagcggtttagattttcgtgggcgtcgtatatttgttgtttgtagtagttagcgattcgtattatcgttttcggcgggcggggaagcggtcgtagcggagtcgattcggtaggtggtcgcgggcggggtcggcgagcgaaagtgcgcgggggttcgattatcgcggggtcgggacgcgatggcggcggtagagttcgcgagttcgggttagtaggcgtcggtagggtaggggtagggttagcggtcgtcgtcgtagttttcgtaggcgtaagtttcgtagtcgttttcgtcgtcgtagttcgggggcgtcgggggcggtagtagtaggtacgagaagagtttggggttgtttattattaagttcgtgtcgttgttgtaggaggttaaggacggcgttttggattttaaagcggtgagtttcggaggcggggacgggggcggatttcggaattcgtggttttcggggaagtttagtttttcgtcgcgtgggtttagcggcgtggtgtagacgcgttttgcggggattcgggatcgggtaattcgaggattatgtggtttgcgttcgggtcgtggacgtcgggatgggggagggacgagggattaggatggtatcgagcggacgcgtaattaatggggttcggcgttacgttgggttttcgataaagagtttaggatttcgagcgcgttcgcgtggtttttgttttcgggcgtagggatttgagggtaatcgagtgtttgttgttttgcgtttatttgtggtagaggtttacggggtaacgggcgttttgttcggagatatcgtggatatcgattttgttgttaagaatggatggttttaataggcgattttagttggaattatgtttttgtagtttaaataaaaaggaggaaaaataaaatttagtttgttatttttattagatgaaagaaaaaaaaaaaagagtatttttttttacgttttttttcgataaaatagtattaaattttttttgtgtattttttttattattttgatagttaggaggggtatttgatttgtgattttatttggtatgtgttatgggtttttaaaagtgagatttgttgttatacgaaaaggggatattttataatttttatttaaagaggtggaagtgtttagtaaattttttttttgcgtcgttttttatagcgtttagattttttaaataggagtaggtattaaaagttgttttgttatatagaatgatttaatcgatttaggaaggatttggaagaatttaatagcgtttaggataatgagaatgtggttatttcgcgcgaagtttaagaattaaagttttagaaataaataaataaaaaatattaattgtttaataattattgtaaattttttttgattttttaaatgtggttttatttggaggattggttttagtttttaggggagtgtttggattattttatttggtttgagagtgttattgtatttttaaggttttgtataaagtagtggtagttttttgaatgtaaggattaagatttgtaggggttaatttttttgttagaagtttttttttagtgtagtttaaggggaagtagatttttttagtgtttttttttttttttggatgtagttggtgtttaattagtgattgttgaattgaattatttaaattgtttaattttatataattgaggtatgttgtatatattttgtattttggtaagtaatttttattattttttttttgatatgttatttttggaattttttttttatttttggaaattttttgtttttttttttttattatagttttttttttttttttttttttgaaagtgatttatggtatgtgtagtatttaaattgtagtgaattaaaatggattttgtttaaagaattttataggaagttatgaagttattagagaaagttaggaatgttataaagtataggtggtaaattgttgtttaaaatttagaaatttagttgtagtttgtgattttggtgtaagaaaattagggaagtttggggttttttaggtaaaattgaattttgacggttggattttgagggttttttttttagtttgttttaggatatggtggaattttgtttttttttgatttgaaattttttagtttttttttgttttatttgtggttatataattgttttatagaagttatagaggtagtgagtaggatgtaaagtttggtattttatgataataattgttttatttattttggaatttttttaaaaatttaaaggtttttataataatattgttttattatattaatgattttatatttttagaaaagagtttgaatgtttttagtttttatatatatgtatgaaaaatatatgttttatgtattttacgtatattttttatttatttatatatatttatatatgtaaaaatttttttttttttttttttgagacggagttttgttttgtcgtttaggttggagtgtagtggcgcgatttgggtttattgtaagtttcgtttttcgggtttacgttatttttttgtgttagtttttcgagtagttcggattataggcgttcgttagcgtatttagttaatttttttgtaattttagtagagatagggttttattgtgttagttaggatggtttcgattttttgattttgtgatttacgcgtttcggttttttaaagtgttgggattataggcgtgagttatcgcgttcggttaaaaattttatattgaaatttttttaatgatattttttattatatattatagtaaaagatcgttaaagttttttttttttgagattgagttttgttttgttatttaggttggagtgtagtggtagatttttgtttattgtaatttttatttttcgggtttaagcgatttttttgttttagttttttaagtagttgggattataggtgttcgttattatgttcgatttatttttgtatgtttagtagagaaggggttttattatgttggttaggttggtgtcgaattgttaattttaaatgatttgtttgttttagttttttagagtgttgggattataggcgtgagttattatatttagtttattaagatatgtttgataatatatattaaagatggatttatattgataattataaatttnttttaatttgaaattataaagatatatttttttttgtatttttattttggtgggggtatattttagtataatttttttgaaattttttagttttttaaagtaaatgtgattaagaaatatatatatttatttaatagttatagtggtaagtatgggttgggaatggtgatttgttttgttttttatttattttttgtttgtatttaggtaattgtttagggttggaggaaaatgtaaaataatgttgataggttttattttaaatttatgattattaattataaaggggttagtagtgttgtttagcgttttttttatgttatttattgttttgtttttttatatgaatattttgtatttttttttttttttttaattattaatagtttttttttttttttttcgattttagtgttgatgagagaataaaaattaattagaaggaaatgtttaatttttttttttatttggtttattaatgtatttatatttgtatttaggtattttgttggattttagttattaatatgttttgttattatttaaggatagtttttatttattgaatttatattttgttttttttatttattgttatttttagtagttatttttttttttttttgtattgttaatgatttttttttttttattagattatttttattagtatatttatatgttgaaatagtttttatttttaaaaggaaaaaaaaaaattttttggagattttatagttttttaaaaatattgttttatttttttttatttttttgtagtagaattttttaagagttgtttattttagttttttttttatttttttttgaaatttttttattaagatttttagttttatttttttgttaaaatagttttgattaaagttatttatgatttttttaaaggtaaattattgattagtttttattaatttgttttgatagtaatatttgatatggttatatttttttatattttttttttttggattttaagattttatattttttgatttttttttgattttagtggtaggttgtttttttattttttggattttaaatttttttagagttggtttttaatttttttttatatgtttattttttatgttaaattagtggattttattttgtggtataaattgtttattcgttgaagattattgaatttatatttttagtttggattttttttttaagtatatattttcgtgtttagtggttttgttttttttttgtggatgttagaaggtttaaggttagtttttttatttttagtgttttaaattggttttttttgtagtatattttatttgtaattgtttttattaaaaattgaagttatttttgatttttttttagggatttgttgtttgttatatttttaaaatatatttagaatgttaatattttttattatttttatagttatttttttatttaagttattattattttttgtatggattattgttatcgttattttgttggtttttttttttgtttttattttttttttttatttttttttttattattttgttatattggtttgtttgtttttttttgaagaagttaagtattttttatattttagaattttcgtgtttgttgttttttttgtttagaatgttttattattaaatatttataggggttttttattttatttaaatgtttagatgttattttgttagagagttttttttttgaaaattttatttgatatagtattttttttttgtttgtattttttttaaatataattatttgtatattattaattttttttttttttttgagggtagggattttgttttgttatatttatatttttaagatttagaattaagtttggaatattttggtgttaaatgaatggaggaaggtagtggtgatagtggtggtggtggtggtggtggagatttatggtattattttgttagatattaaagttttaaattagtttttaaagaatttatatataatttttttaaatattatataaaataaggtaaatttgtatatatataaattttaattaattttaaatatagttttatttacgattcgttttaatttgtatttgatgatgaggttgattagttaatatttaagtaattattatatagtagatattgcggtaagattatttagtttaatttttataatattttttttagtatatgttatattattttatgaaaaaggaaatgaggtttagtgagtttacgatgaggttagttgaagataggaagtggtagttttgggattggattttagtgtgtttagttttagaattttttaagaatgatgggattggttgggtgttatggtttatatttgtaattttagtattttgggaggtcgaggtgggtggattatttggggttaggagtttaagattagtttggttaatatggtgaaatttcgtttttattaaaaatataaaaattagttagtcgtggtggtatatatttgtagttttagttatttgggaggttgaggtaggagaattagttgaatttaggtggtggaggttgtagtgagttaagattatattattgtattttagtttcggtaagagagggagattttgttttaaaaaaaaaaaagaatgatgggattttttaaaataaaatttttttggagatttttttatatatgatttgtatatgttagttatttatatgtttatatatttaaatagtaaagtatttgagaaataatgtttagttttagaaattaggggttaaatgttgtgattgttaagtagtaataaatataaatgataaataagatatttttttaaaattttgagttaaaaattaaattttatggtattttgtttaatgatttaagttagattttgtggtttggtttatataaatatgttttgatattaaaattagagtgttgttgttatggttgtgaatgtttttttgtgtgagtatatagatattagtaatatagagttatggtttggagttttttgagttatttttttagagagaggaaagtgagaaatgaaattttagttttagatttgtatcgttaattttgtagtcgtgtattgttttttataaaaatagtttcgaagttaagagtaaaaattttgtgaaggtcgataaaataagaagggaattgttaagtataagggaagaaggtattaatgaaataaattatggttagttttgttgttaattttttggttttttagaagggatagtgttaagttagagttggggaataaagagttttatttttttgttttttttttttttgttatattttgtttatttttttggtttattgaggtatgaattttttttttgaggaagatttgaatgatgggatagtagtaatttgggggttttggtggtatatataaaaaaatgtgtttgagagaattgatattttttttaagattttaaatgtttgtatagtgaatatagttgttagtggtattttttttggggggaaggtaggtttagattgtaaatattgtgttgagttaggtttttatagaattaagaaagtagtgatgttttttgggagagttgttagtaattatgcgaagttgggagagttgttagtaattatgtgaagttaaattttgtttatttagatattttagataatgtgttgaaaattgttagtagagatataaatatttgtaattattatggattttaaaatgtggttttatatttaaaataggttattgtttaatttattttgaaaatttttttgaggttttttttgtttttttgggaatatatattaaaaatgtgaattggaattaattagaggaattgtttgttgaatttataatatgatagtatatattgttttgttgattttatttaatgtgaatgtagttattaagtttttgtataatagttgttagtgtaattttgagttattgattttgattttttgttgattttatgttttgtgttaggatggtatgatttatttttttgttttcgttattaatttaaaaatgtagatatttattttaaggtattataagtgtgtatatagtttagaatttttaagtgttttaattattaaaataaattgttgagatgtaattttttaaaattttaaaaaataagtaatgtatttttagatgagattgtttatgaatagagaaataagataggaggtgatatggataggtaattagtagtttttttttaggattagtttataaggtgatataaagtatttttattgtgtttttttatttttgtaggttttgtgttatgattttaatttttttttttgttttaatatttgttagtttttaaatggaataatttttttggtatttgtagtgtttgggagatgttttgaatatgtttagttattgtttttaagtaattgagtgggttaaatttgagattggatttgttgtggatttaataattaattttttttggttttaaaatatgatttgttttttattttattgttttcgttgttttttttgaatagg

SEQ ID NO: 44 - DNA, 12405 bp, Artificial Sequence
  chemically treated genomic DNA (Homo sapiens)
  unsure (4511)
tttgtttaggaaagataacgagaatagtgaaataaagggtaagttatattttaaagttaaaaagggttgattattaaatttataataagtttaattttaaatttgatttatttagttgtttggggataatagttgagtatgtttaaagtattttttaaatattgtaaatattaaagaaattattttatttaaaagttagtagatgttggaatagaaaaagaaattaaggttatgatataaagtttgtaaaaataaaagaatataataagaatattttgtgttattttatggattaattttgaggaggagttattaattgtttatttatgttattttttattttatttttttgtttataaatagttttatttaaagatgtattatttattttttaaaattttaaagaattatattttagtaatttattttggtaattaagatatttggaaattttgaattatatgtatatttataatattttgaaataaatatttatatttttaaattaataacgaaaatagaggaatgaattatgttattttaatataaagtataaaattagtaagaaattagaattaatagtttaagattgtattagtaattattatataaaaatttggtagttgtatttatattagataagattaataaaataatatatgttattatgttatgaatttaataaataatttttttgattagttttaatttatatttttgatgtgtgtttttaaaagaataaagagaattttaaagaagtttttagagtggattagataatagtttattttgaatgtggagttatattttaagatttatggtagttataaatatttgtgtttttattgataatttttagtatattatttaaaatatttaaatgaataggatttagttttatataattgttaatagtttttttagtttcgtataattgttaatagtttttttagagagtattattatttttttgattttgtgaaaatttagtttagtatagtgtttgtaatttggatttgttttttttttagagaaggtgttattgatagttatatttattgtataggtatttgggattttaagagaaatgttagtttttttagatatatttttttgtatgtgttattaaaatttttaggttattgttgttttattatttaggttttttttaagaaggggatttatgttttagtggattaggagaataagtaggatgtggtagaagaaggaaaagtaggagagtggggttttttgttttttaattttaatttggtattgttttttttagagaattagaaaattaatagtaggattagttatggtttgttttattgatattttttttttttgtatttagtaattttttttttgttttatcgatttttatagaatttttatttttgatttcgaggttgtttttatgaagagtaatatacgattgtaaagttaacggtataaatttgaagttgaggttttattttttatttttttttttttagagaagtaatttagagaattttaagttatggttttgtgttattggtatttatgtatttatatagaaaagtatttatagttatagtaatagtattttggttttggtattagaatatgtttgtatgaattagattataagatttagtttaggttattaggtaaagtgttatgagatttaatttttagtttaaagttttaaaaaggtgttttgtttattatttatatttattattgtttaataattataatatttaatttttagtttttaaaattaaatattattttttaaatattttattatttaagtatgtaaatatataaatgattaatatgtatagattatatgtaaaagaatttttaggagggttttattttagaaagttttattatttttttttttttttgagatagagttttttttttttgtcgaagttggagtgtagtggtgtgattttggtttattgtaatttttattatttgggtttaattgatttttttgttttagttttttaagtagttgggattataggtgtgtattattacgattggttaatttttgtatttttagtagagacgaggttttattatgttggttaggttggttttgagtttttgattttagatgatttatttatttcgattttttaaagtgttgagattataagtgtgagttatggtatttagttagttttattatttttaagaagttttgaagttaaatatattgagatttagttttagggttgttattttttatttttagttggttttatcgtaagtttattaagttttatttttttttttataaaatggtataatatatattgaaaggagtattgtgggaattaaattggataattttatcgtaatgtttattgtatagtgattatttaaatgttggttagttagttttattattaaatataggttgaaacggatcgtgggtaagattgtgtttaagattggttaaagtttgtgtgtatatagatttattttgttttatatagtgtttgaaaaagttgtgtgtgaattttttaaaaattaatttggggttttaatatttaatagaataatattatgaatttttattattattattattattattattattattatttttttttatttatttaatattaaaatgttttaggtttggttttgggttttaaagatatagatgtgatagaataaagtttttgtttttaaagaagagagggaagttaataatatataaataattatgtttggagagaatgtaggtaagaggaaggtgttatattaaataggatttttagggaaagagttttttgataaggtgatatttgaatatttgaatggagtaggagatttttgtgaatgtttggtggtagagtattttgggtagaggaagtagtaagtacgaaggttttgaagtgtgaggggtgtttagtttttttaaggagaggtaggtaggttagtgtggtagaataatgagagggaaaatggaaaaaggagataaagataggaaaggagattaataagatggcgatggtaataatttatgtaggagatggtagtggtttggatggaggggtagttatgaagatggtgaaaaatgttaatattttggatatattttgaaggtatggtaagtagtaggtttttagagaggaattagaaatgattttagtttttgataagagtaattataaataaggtatattatagaaggaattagtttggagtattggaaataaagaaattggttttgaattttttgatatttatagggagaaagtaagattattggatacgagagtgtgtgtttaggggagagatttaagttagagatataaatttagtagtttttagcgaatagatagtttatattataagatggaatttattagtttgatataggaggtgagtatataagggaaggttaagaattaattttggggaagtttaaggtttaggaaatgagggagtaatttgttattgaagttagaagaaaattagaaagtgtggggttttggaatttaagggaagagagtgtaagaaagtgtgattatattaagtattgttgttagagtaagttagtgagaattgattagtgatttgtttttggaaagattatgggtgattttgattagagttgttttggtagagaggtggggttgaaagttttaatggagaaattttaagaaagaatggaaagaaagttagaatagataatttttgaagagttttgttgtaaagaggtaagaagaaatggggtaatatttttagggaattgtggggtttttaggaagtttttttttttttttttaaagatgggagttattttaatatgtgagtatgttgataggaatgatttggtaaagaaagaggaattattaataatgtagaagagagaagggatgattgttagaggtggtaataagtagggaaggtaggatgtgaatttaataagtgaggattgtttttagataataatagggtatattaataattgaagtttagtagagtatttgggtatagatataggtatattagtagattaggtagggagaaaggttagatatttttttttggttgatttttatttttttattagtattgggatcggggagaaaggaaaggagttattaatggttgagaggagagaagaaagtataaaatatttatataaaaaagtaagataataggtagtatggaaggaacgttggatagtattattggtttttttgtagttggtgattatgaatttaaagtgagatttattagtattattttgtatttttttttagttttggatagttgtttgggtatagataaggggtaggtggagagtaaagtaagttattatttttaatttatgtttgttattgtaattgttgaataagtatatatattttttaattatatttattttaaaaggttaaaaagttttaaaaaaattatgttgaaatatgtttttattaaagtaagaatataagagaaaatgtgtttttataattttaaattaaagnaaatttataattgttagtgtgagtttatttttaatatgtattattaaatatgttttaatgggttgggtatggtggtttacgtttgtaattttagtattttgggaggttgaggtaagtagattatttgaggttggtagttcgatattagtttggttaatatggtgaaattttttttttattaaatatataaaaatgagtcgggtatggtggcgggtatttgtaattttagttatttgggaggttgaggtagaagaatcgtttgaattcgggaggtggaggttgtagtgagtagagatttgttattgtattttagtttgggtgatagagtaagatttagttttaaaaaaaaaaggttttaacgattttttattatggtgtataataagaaatattattggaaagattttaatgtaagatttttggtcgggcgcggtggtttacgtttgtaattttagtattttgggaggtcgaggcgcgtggattataaggttaggagatcgagattattttagttaatatagtgaaattttgtttttattaaaattataaaaaaattagttgggtgcgttggcgggcgtttgtagttcgagttattcgggaggttgatataggagaatggcgtgaattcgggaggcggagtttgtagtgagtttagatcgcgttattgtattttagtttgggcgatagagtaagatttcgttttaaaaaagaaaaaaaaaagatttttatatatataagtatatataaataaatgaaaaatatacgtaaaatatataaaatatatgttttttatatatatatatgaaaattaaagatatttaaatttttttttaggagtatgaagttattaatataatgagatagtgttattgtagaaatttttgaatttttaggagagttttagaatgaataaagtaattattgttatgaaatattaaattttatattttatttattgtttttgtgatttttgtagggtaattatatagttatagatgaaataggaggaagttaaagaattttaagttaagaaagggtaaagttttattatattttgaggtaagttgagggagaagtttttaaagtttagtcgttagagtttagttttatttggaaaattttaaatttttttgatttttttatattaaagttataggttatagttgaatttttagattttgaatagtagtttgttatttgtgttttgtaatatttttggttttttttgataattttatgattttttgtgaaattttttaaatagaatttattttaatttattataatttaaatattatatatgttataaattatttttagggagagaaaggaagaaggggttgtggtggaaaaaagagaataaggaatttttagaggtgggaaaaaaattttaggaataatatattaaaaagaaaatagtagaaattatttattaaaatgtaaaatatgtgtagtatgttttagttgtatgaagttgaataatttaggtaatttagtttaataattattgattgaatattaattatatttagggaaaggagagggtattgaaaagatttatttttttttgggttatattggaggagggtttttagtagaagagttggtttttgtaagttttggtttttatatttagggagttgttattgttttatgtagagttttgaggatgtagtgatatttttaagttaggtaaggtggtttaggtatttttttgggagttggggttaattttttaagtaaggttatatttagggagttaaaggggatttgtagtgattattgggtagttagtgttttttgtttgtttgtttttaaaattttagtttttaaatttcgcgcggagtgattatatttttattattttgagcgttgttgaatttttttaaattttttttagatcggttaagttattttgtatgatagaatagtttttgatgtttgtttttgtttgaaaaatttgaacgttgtaaaggacgacgtagggagagagtttattgagtatttttatttttttgggtgaaagttgtaaaatatttttttttcgtgtgatagtagattttatttttggaaatttatgatatatgttaaatgaagttataaattaaatattttttttaattattagggtgatgaaagaagtgtataaggaagatttaatattattttatcggggaggggcgtggaaagaagtattttttttttttttttttttatttggtagagatggtagattgggttttgtttttttttttttttatttaaattataggaatatggttttaattggaatcgtttattaaaattatttatttttaatagtaaaatcgatatttacggtgttttcgggtaaagcgttcgttatttcgtgagtttttgttataggtggacgtagagtaatagatattcggttatttttaggtttttgcgttcggagatagaagttacgcgggcgcgttcgaggttttgggttttttgtcgagagtttagcgtggcgtcgggttttattggttacgcgttcgttcggtgttattttggtttttcgttttttttttatttcggcgtttacgattcgggcgtaggttatatggttttcggattgttcggtttcgggttttcgtaaggcgcgtttatattacgtcgttagatttacgcggcgaggggttgggttttttcgggggttacgggtttcgaagttcgttttcgttttcgttttcggagtttatcgttttgagatttagaacgtcgtttttggttttttgtagtagcgatacgaatttggtagtgagtagttttaggtttttttcgtgtttgttgttgtcgttttcggcgttttcgagttgcggcggcgggggcggttgcggggtttgcgtttgcggaggttgcggcggcggtcgttggttttgtttttgttttgtcggcgtttgttggttcgagttcgcgggttttgtcgtcgttatcgcgtttcggtttcgcggtggtcgggttttcgcgtattttcgttcgtcggtttcgttcgcggttatttgtcgggtcggtttcgttgcggtcgttttttcgttcgtcgagagcggtagtgcgggtcgttggttgttgtaaataataggtgtgcggcgtttacgggagtttgggtcgtttgttacgtcgggttttcgttttttttttaagttcggggaagcgtgaatgaggtttacgatcgaggggggaggggtggaaacgaggagaaggggttgcgaggggtggggatttgagtttaaatggtaggaagtgacgtcgtcgttcgtcgttgtttagaaatatatttttttgtaggaaggaggagcgtacgaggaggaggaggggtgttggcgcgtgtgttttatattcgtttttttggcgttcgcgagttgattcgaggagtggtaattttacgcggtaaagtagggaggaagaaaaaaaggagataaaagaaaaaaagatttttatttgggtagaaagttataatgtttagcggttaaacgtttgtgagcggtgaagttggttgattgtttaagtttgtagagttttagtagtaggttattttttttggacggtttttgttatttttgtttttttcgagttttagtatcgtttgtaaatattttaatgatttggattaagtgtagagttttattttatagtttatttttttagattcggagtatagaaaaaggtatcgtggagttttagggttggtttttattaattttttttaaggtttttattttttatatggagaaacgtgtagagggagaggttgtgaattgttaaagatatgtcgttagattttagattttttgtgtttgattaaagtttttgattaaagtttttaatattttatttgaattaaattatattgtatttggaatattgggtagttataggtttttggattttagtgatattttaaattattgatggtaaatgatattatggagatttgagtaaaagaaagtcgttgggattttttttttattatattataaatttttgagaatttagattaaattttaaatgatttgttgttatatttaatattttgaatatagtagataataaagattaggcgaatgagattaggcgcggtggtttacgtttgtaattttagtattttgggaggtcgaggtaggtagattatttgagattaggagttcgagattaatttggttaatatggtaaaatttcgtttttattaaaaatataaaaattagcggggggtggtggtgttcgtttatagttttagttattttagagtttgaggtaggagaattttttaaatttaggaggtagacgttgtagtgttgtagtgagtcgagatgttattattgtattttagtttgggtaataaagtaagattttgttttaaataaaaaaaaaaaagattaggtgaatgaaaattttatatggtaataattaattaagaagattttatgtaagaaagattttgtttaattttaagtaataataaattaataaaaaaggttattgaagcgatattaaatataatagtattaattagtaaagttgaatatattatttataatatattataggtatagaattttataatttttattaataatttatttataataatttttattttaattaaatttataaataaaatttaaaattgaaaatttgaagtaaaatatgaaaaatttagttgatataattattttttaataatttatttaagaaaggttatttttatttgatttgatatgggatatattattgataagttttgtaaatttattttattgattattgttaagtagtattttttagaatatattgaattaggaagattttaatttgtttttaattttataatagaatattgtgttatatgtgtagggataggaattaataatattaaatgtattaatatttttaaaatttatatttttatggtgttttagtttgagaaagtattataaattgggtgatttaacggaaattaatttttttatagttttggaggttgtaagtcgacgattaggaggttgttatggttaggttgtggtgagggttttttttttggttgttagattgtggtttttttattgtgttaaatggtagagagagagagaaagatagatagaatagagatagtataagtttttagattttttataagggtattaattttatttgagggtttaatttttacgattttatttaaatttaattattttttaaaggttcgagggttagggttttaatatataaatgttggggagatatagtttattttatggtatgtaattatattttatagtagttattttggtaatttttaaaaataatattttttaaattttagttttaaaaggttttttataaagtaattatattattagtgattttaaaaggttaattaataatttattttgtattgttatttgtgttttttataatgaattttttatttttttagattgtttggggtttaattagaaattatttataaattagtagttattttaattagtatttaaaattttatgtttgtttgaagagttaaaaatcgtttatattagtggtttttagattttaggggaaaaaattatttataatgtttgttaaaaatttagatgtttggatttaaattttagggattaaattagtatttgatatgagaatatgatttgtgagtttatattttttatagtttagataatttttatgtataatatagttattttttgagaaacgttaaatagtataatgaaaaataatgtaatatatattttttttaaaaatcgataaaaaatagagattgataatgtaaaagttttttaaatattgttaaatgtttttaaaaattttattttttaaaaaaattaagaaatatgattttttaaaagttatgatataaataatgtttaagaatatgatattgattagttttgtaatttaatttttatttttgtatttttttgattataaaggagataatttttaaaaggttgtaaatttttatattagttttttgtgttatttttgataaaggtttaaaaattatttttaataaaagttaaagttggttgagtgtttacgtttggttgggtatttacgtttgtttgtaattttagtattttggagggttgagagaagaggattgtttgaatttaggaatttaggattagtttggataatatggtaaaattttatttttataaaaattataaaaattagttgggcgtggtagtgtatatttgtagttttagttattagagaggttgaggtgagaggattatttgagtttaagaggttaaggatgtagtgatttgttattttgttattgtaatttagtttgagtgatagagtgagaatttattttaaaaaaaaaaaaaaaaaaaaaaatttaattgaattaaattatattttattgatttataagggtaataaatgtataatagtaattttttattaaatttaatttacgttgattagttgggtagatattatttttaattataatattgtttatatgtttttggttaaattttttttttttaaatgtattttggaagtgtagttttttagttagtttaggattaagaaggaaggtttaaatattttaaaatagaatgattttttagtttatagtttattaaatttatagtatttaatatttgtggaattttataaatgttatttttatagagatttaggattaatttaaaatatgtatagttttgttataatttggtagttaaatatttaagaaaatttaataaaattttatttgtttattgatgatgatagattgattttttttttttttttttgaaatggaattttgtttttgttgttttattttggaatgtaatgggtttattttaatgagaattaaaataaaaattgaaagaatttgtttttaattgagttatatggtattttatgttgatttattttatgatgaggtttggattaattattatttaattttaaatattgttaaagataatttatatttttagatgttaatgtagaatgttttattttaatttataattaagaggaattttttataagttagtaataggataattgtgtaatagaattttatagagatattatttaatttaatgtttatggtagttttagtgttttttttgttatattggaaatagatttataaagttaatgaatgattaaggtggaatttagtattaattgtatatttataaatatatttgtggtaaaatatttttaaatggatttatatgattttaaatgattttaaataaatttggtatatagttaaaagtttttaagttatataattgtattgaagaagtaatttaaataataatggtttataggaagttttatattaagtgtataaaatggtttgaaaaaatagaaagattttaatttttatttattattgaaaaataataaatagtaataaaaaattgtatatatgtttaaagttttgggattgtgattaatattttatagaatgaggtttaaaaaatgaaatagtatttaaagtagataaaatgttataagagatagaaaaatgagagattatttaaggtgggagtaaataggaaatagtttttggaggtggttattatgtgtttttaatgggtttgtaagggttattaaattaataaggaaattaaatataaaagaataaataatttattttaaagacgtaaagcgttttttttaggagtcgtatgttttaatttttagttattattttattataaggaaatttttttttaaaaaatttgtatgggtcgttttgttattttaaattaattgttattgtatttgatatttttgaaatgtataagttttaaatttttaaaaaaaaatttttaaataaattttgtataaatttttaaaaaag

SEQ ID NO: 45 - DNA, 6167 bp, Artificial Sequence
  chemically treated genomic DNA (Homo sapiens)
tattatgatttgaaattattttttttatttgtataattgtttatttttgtttattttattaaatggtattttttatgagagtaaagttttattgtagaatttttaagatttagtattgtatttaatatatatagtgggtaataaatttttttaaaagaatgaatgttttatttaattttattttttgttattttttaagaggaaatttttttattttagtttatttcgtttttttttagttttattttttttagatagattatatatgggcgtttttggttaatttatttttaagtttggtttgaaatagttttttatttttttattataaagtttgggtttttttacgtttttttttttttaaaatttttttattgtttttgatcgttttttagttttttggaatttttttttttttttattttttatgttttttagtgttattgagttttgttggttaatagggttgttttttttttattttttatttttttgtaatatagaatttaggtttttttttatttagttgtaagatttttagaggtaaaggtttatgttatggattttatttttaaattttgattgtagttagtttttagggaagtttttattgttgttgataatgggtgtttaattggttaggttgtgagtgagagaaattaattgaggatgttttattttatttaataaaaaaggaatttattggtttgtataattaaaaagtttaggttgagtttagggattttttgtacgtttgttttttttttttgtatgttttttttttttgattttttttgtattggttttatttttaggtaggttttttaggtttgtgggcgaaacggtttttaggtttatattttattggtttagtattattagggaaagggaattttttttttttaagagttttggaaaaagtgatttttattggtttggtttgggttatgtgtttattttgatttaattattatagttagggaaatgaattatttttaggttaggttatttttgggtggatggttaggtttagggaatatatttatttatagatgtagagtaggggttatttgtttttaattatatggattagggtggttttttaaaggaaattgttggttggggaatagtaataaaaagaaaggggaattgatgttggttatgtaaaataaaagatgtagacgtagattatgagaattttttatgttgagttttagtaagaatttgataaatacgttaggtgagttgtataggataattatcggggaattggtttgttttggttggggtagaggatgtttttttttagtttgggcggttttttagtgatagtataagaattttaggtcgatattttggtttagtgttgttattcgtaagttcgggaagattgtgatgtagttggtttagggtaaaagttgttttttttagatttttataggcgattttgttgtatagttaaggttgaaaaatgttgttttagtaaacgttttattgtagtaagatgggtttagattaatttttagggattacgttttttgtgataggattggtatgtttttttttatttgtatagttttttagaaaagggttattggagtttttttggaggttgaggatgggtgggtgaattgtggatgattttatggatttaaagtttttgaaaagaataatagttattgtttgttgaatgttaattgtaaggtaggtattgtgtgttgggatttgatatatggtagttcgtataagttttagtttttataataatatttttatgtgggtattattattattatttatttatttgagatagagtttcgttttgtcgtttaggtttgagtgtagtgttgtgatttcggtttattgtaagttttatttttcgggtttacgttatttttttgttttagttttcggagtagttgggattataggtggttattattacgttcggttaatttttttgtatttttagtagagatggggttttatcgtgttagttaggatggtttcgattttttgattttatgattcgtttgtttcggttttttaaagtgttgggattataggtatgagttattgtgttcggttttatgtgggtattattaatattagttttattttatagttgaagaaagtgagatataaaaagtatggttggttgggtacggtggtttacgtttgtaatattagtattttgggaggttaaggtaggtggattatttgagattaggagtttaagattaggttagttaatatggtgaaatttggtttttattaaaaatataaaaattagttaggtgtggtggggtgtatttgtggttttagttattagggaggttgaggtaggaaaatagtttgaatttaggaggcggaggtcgtagtgagttaaaattgttttattgtattttagtttgggtgatatagggagattttgttttaaaaaaagtaaaaataaataagtaaataaaaagtttggttggttgggtgttgtggtttatatttggaattttagtattttgggaggtcgaagtgggtgaatcgtttgagtttaagagtttaagattagtttgggtaatatagcgaaatttttttttacgaaaatataaaaaaaaaaaaaaaaaaaaaaaaagtaaaagttaggcgtggtggtaggtatttgtagtttaagttattcgagaggaggaggttggaggattatttgagtttgggaggcggaggttgtagtgagttcgcgttattgtattttaatttgggtgttagcgtgagatttcgttttagaaagaataaaaatattaaaaaaaaaatttggttaaggtattttattagggagtggtaaaatggatatttagatataaggttatttgcgttgtaatagtttggtttttttgtttttgcggtaggagttttttgagaggcgtattatttttgttttaatggataattcggtagatagtgggagtgagttttttatttttttagcggatttgagacggtaggtttcgagacgagggagttttggtttattaagttggtttttataagaaaatatgtttggaggggggatagttatagagggattaagtttaagaaagttatatttttatttatttaatttttttgatttcgatttttagaggttgttggggtttatagaggtttttatttttttttttttttttcggtgtcgttaagtattttttttttttatattttttttttgttttttttttaaatttagaaaaaatagtattttttttggatttagagttagagtaggaggagtttttttttttcggaatttttgttttttttggggtgagtaattgattgcgtcgtgggggcggggagggtttttttgttcgcgttcggttttagggagatttgcgggaatcgttttttttcgttattatttattttttgtttttttttttttttcgttttggttaggttcggggtgaggagtgttatttcggagtttgggcgtttcggtagtgacggttttttagggattgtagggggagttcgggttgtagcgtttgtttagttcgtgtttattgcgtcgaaggttttttcggtttggtttcgcgtttagcgtcgtattcgggaggaggagcgaggaggcggcggaagagttcgcgcggtcggagttcggggttgggagtggagagggaatttttagggggtagtatcgagtcgttaagtcggtttttttttcgcgtttagttcggggtttttagatagtttatagggaagtttttttttcggattttcgtagtgtgggtcggttttttatttggattggataaaggggggaaagtgattttttattataaggattattattttttggtgagaataagaattaggttttttttggggtaattagtttttttatttcggttttttaaaggtgggttttttgtcggcggggattagggaatagtttttcggtttcgggggagtataggggattttaggtattagtagttttattttatcgataggtggtagaggtaaggtagtttattgttatatagtgttttaagaattaagtggtcgtgattttttatttttaattttttagcgatattcggaaagatatcgtgttatagatcgaggttcggggttaaggttaaggtttcgttttttttgggcggtttttgtttaggcgggtttagtcgtttttttttcgtattttcggttcgtttttacggtttttgaggtgggcgggcgggttttggatgatagcgatagaatttcggttcgattcgttttcgttttcgttttgggtttgggtttttttagtttagtttacgtttaggagtcgtttgagtagtcgcgcgtttagcgttatacgttacgagtttttttcgtttgggcgttttcggatttcgcgagcgttcgggttttcggtttggaattagggaggagggagggagcgagggagtaattagttgcgattcggaaatgttatataaggagtaggaaggatttttcgtcggaataatttttatttgggtagtattttatttggagtggttcgatatggttcggtcgttttcggttttgggaggagggaagaaggcggagggaggggtaacgcgggaatttcggagttgcgcgggtttcggaggtttcggcggcggttagagttttaggttttttcgaagtttgggcgtttgggatgcgggcgcgggcgcgggttttagggtgtaggatggaggtgtcgggcgttgtcggatggggggttttacgttatttcgggttttttcggtcggttttgttatattagggttttttgttttttatatatggttatgtacgttacgacggaggcggattcgtgtcgttttagattttttaaatagaggcggattcggggagtcgcgagagattttagcgcgtagaatttggggagtcgtcgtcgttattcgtcgtcgtagttagttttcgtcgtcgtaggatcggtttttgttttagttttcgtagtcgcggcgcgtttacgttcgttcgcgtttagggcgagtcggggtcgtcgtttgtacgttttttagtgtttttcgcgtttcgtatgtaattcggttaggttttcgtaattgtgttttttgtagttttagtttcgggttgtattttttcgtttcgatattagttttttagtttgttcgtttaggatggtcgcggttaaggtcgagatgtagttgatgttttcgttgtagatttttgattcgttcggattttttttttattcgtttattatggataattattttaagttggaggagatgatgttgttgagtaacggggttttttagtttttcggcgtcgtcggggttttagagggtagcggtagtaatagtagtagtagtagtagcgggggcggtggaggcggcgggggcggtagtaatagtagtagtagtagtagtatttttaatttttaggcggatacgggcgagtagttttacgagtatttgatcgtaggtaagtagtggtttacgtcgagggggaattttttcgttattattttggcgttttgttttttatcgtaggagtgtttttggattttagaatgagagtcgggttttttttttatttttcgtatttttagagttatgtgttagagggatgttaaggaattttatatagtttattttttgtttttatttttagcggagcgtagaggatcgagtttttgttttggatggagagttttggagttgcgtgggtgggtggagggggagggtttgttttgatgagcggggttgcgttttttatttttagtaagatttgttttgttttgtttgtcgtttgtttttaaggaaggatcgtgatttttggtcgtggatgtttcggtagttcgggtttgggggcgcgtattagtcgcggttatgggggtgttggcgggaatttttcgttcgtatagtcgtcgttgcggagcgttgcgagttgtagtggagggggatttttcgtatttgcgttagttgttgttgaaatgggttttgttattggtgcgggtttaggaatattgtaatgtgttgttattaattattaattatttcgggagttaatggtagtcggttcggttttttgtttggtagttcgggtcgttttcgttttttagtgattgttttttagtaattaggtttttcgttttttttttttttgttaga

SEQ ID NO: 46 - DNA, 6167 bp, Artificial Sequence
  chemically treated genomic DNA (Homo sapiens)
tttggtaggagagagagaagcgggaggtttggttattggaaagtaattattggaggacgaggacgattcgagttgttaggtaagagatcgggtcggttattattgattttcgaggtagttaataattgatagtagtatattgtaatgtttttggattcgtattagtggtagagtttattttaataatagttgacgtaaatacggagaatttttttttattgtagttcgtagcgtttcgtagcggcggttgtgcgggcgagggattttcgttagtatttttatggtcgcggttagtgcgcgtttttaaattcgggttgtcgggatatttacggttaaggattacggtttttttttggggataggcggtaagtaaggtaaggtaagttttattggaggtggggggcgtagtttcgtttattaaaataagttttttttttttatttatttacgtagttttagagttttttatttaaaataaaagttcggttttttgcgtttcgttagggatgagggtagggggtgggttgtgtggggttttttggtatttttttaatatatgattttggggatgcgaggaatgaaagggaaattcggtttttattttaagatttaggagtatttttgcggtgaaggataggacgttaggatggtggcgaaagggttttttttcggcgtaggttattgtttatttgcggttaggtgttcgtagggttgttcgttcgtgttcgtttgagggttgaaggtgttgttgttgttgttgttgttgttgtcgttttcgtcgtttttatcgttttcgttgttgttgttgttgttgttgttgtcgttgttttttggggtttcggcggcgtcgaggaattggggagtttcgttgtttagtagtattattttttttagtttagggtagttgtttatggtgggcgagtgaggaaaggattcgaacgggttagagatttgtagcggggatattagttgtatttcggttttggtcgcggttattttggacgagtaggttggagagttggtgtcggggcggggggatgtagttcggggttggagttgtaggggatatagttgcgggggtttggtcgggttatatgcggggcgcggggaatattgagaagcgtgtaggcggcgatttcgattcgttttgggcgcgggcgggcgtggacgcgtcgcggttgcggaggttggggtaggggtcggttttgcggcggcggaagttggttgcggcggcggatggcggcggcggttttttaagttttgcgcgttgggatttttcgcgatttttcggattcgtttttatttgaagggtttggaacggtacgggttcgttttcgtcgtgacgtatatggttatatatgggaagtaggaagttttaatatggtaggatcggtcgggaggattcggagtgacgtgaagttttttattcgatagcgttcggtatttttattttgtattttagggttcgcgttcgcgttcgtattttaggcgtttaggtttcggggaagtttagagttttagtcgtcgtcggggttttcgggattcgcgtagtttcggagttttcgcgttgttttttttttcgtttttttttttttttttagagtcggaagcggtcgggttatatcgggttattttaaataaggtgttgtttaaataagggttgtttcggcgggggattttttttgttttttatatggtattttcgggtcgtagttggttgttttttcgtttttttttttttttttggttttaagtcgggagttcgagcgttcgcgggattcggggacgtttaggcggggagggttcgtggcgtgtggcgttgggcgcgcggttgtttaggcggtttttaggcgtgaattaggttggggaagtttagatttagagcgggggcgagggcgagtcgggtcggggttttatcgttgttatttagggttcgttcgtttattttagggatcgtgagagcgaatcgggagtgcgggggaggagcggttgggttcgtttgggtaggggtcgtttaggagaggcggggttttgattttgatttcgggtttcgatttatggtacggtgttttttcgggtgtcgttgggaaattgaggataggaagttacggttatttggtttttgggatattgtatagtagtgagttgttttgtttttgttatttgtcggtgggatggggttgttggtgtttggggttttttgtgttttttcggaatcgaaaggttgttttttagttttcgtcggtaaagagtttatttttgggggatcgaagtggggaagttgattgttttaagagaggtttgatttttgtttttattaggagataatggtttttgtggtgaggggttatttttttttttttatttagtttaggtggagggtcggtttatattgcgggaattcgaaagaggggtttttttatgggttatttggggatttcgggttgggcgcgaagagaggatcggtttggcggttcggtgttgttttttggaggttttttttttatttttagtttcggatttcggtcgcgcgggttttttcgtcgttttttcgttttttttttcggatgcggcgttgggcgcggagttaggtcgggggagttttcgacgtagtgagtacgaattgagtaggcgttgtagttcgggttttttttgtagtttttggggagtcgttattgtcgaggcgtttagatttcgggataatattttttatttcgagtttggttaaggcgagggggagaaggaagtagggggtgggtggtggcgagggagaacgattttcgtaggtttttttggggtcgaacgcgaatagggaagtttttttcgtttttacgacgtagttagttgtttattttaaagggaatagggatttcgggaagggaaggttttttttgttttagttttgaatttagaggaggtgttgttttttttggatttaaaaagaaagtagaaagagaatgtggggaaggagggtgtttgacgatatcgagagggaagggaggaggtgagggtttttgtgaattttaatagtttttggaggtcggggttagggggattaggtgggtgagggtgtaatttttttggatttaatttttttgtggttgttttttttttaaatatgtttttttataaaaattaatttaatgaattaggattttttcgtttcggagtttgtcgttttaagttcgttggggaggtggggggtttatttttattgtttatcgagttgtttattggggtaggagtgatgcgttttttagaggatttttgtcgtaagggtaggaaggttaggttgttgtagcgtagatggttttgtgtttgaatgtttattttgttattttttggtagggtattttagttaaattttttttttaatgtttttattttttttgagacggggttttacgttggtatttaggttggagtgtagtggcgcgagtttattgtaattttcgttttttaggtttaagtgattttttagtttttttttttcgagtagtttggattataggtgtttgttattacgtttggtttttattttttttttttttttttttttttttgtattttcgtagagaggggtttcgttgtgttgtttaggttggttttgaatttttgagtttaagcgatttatttatttcggttttttaaagtgttgggattttaggtgtgagttatagtatttagttagttaagttttttgtttatttgtttgtttttgttttttttaagatagagtttttttgtgttatttaggttggagtgtaatggggtaattttggtttattgcgattttcgttttttgggtttaagttatttttttgttttagtttttttagtagttgggattataggtgtattttattatatttggttaatttttgtatttttagtagagattaggttttattatgttggttagtttgattttgaatttttgattttaggtgatttatttgttttggttttttaaagtgttggtattataggcgtgagttatcgtgtttagttagttatgttttttgtgttttattttttttaattgtaaaatggggttaatgttaataatatttatatggggtcgggtatagtggtttatgtttgtaattttagtattttgggaggtcgaggtaggcggattatgagattaggagatcgagattattttggttaatacggtgaaattttatttttattaaaaatataaaaaaattagtcgggcgtggtggtggttatttgtagttttagttatttcggaggttgaggtaggagagtggcgtgaattcgggaggtggagtttgtagtgagtcgagattataatattgtatttaagtttgggcgatagagcgagattttgttttaaataaataaataatagtaataatatttatatgggagtattgttgtgaggattgaaatttatgcgggttgttatatgttaagttttaatatatagtatttgttttgtaattggtatttaataaatagtggttattgttttttttagaggttttggatttatagagttatttatagtttatttatttatttttagtttttaagaaaattttagtgatttttttttggaaagttgtgtagatggggaaaaatatattaattttattataggggacgtaatttttaagagttgatttgaatttattttgttgtagtagagcgtttattagagtagtattttttaattttgattgtgtagtagaatcgtttgtggaagtttgaaaaagatagtttttattttggattagttgtattataattttttcgagtttgcgagtggtagtattgagttaaggtatcggtttgggatttttgtgttgttattggagagtcgtttagattgggagagaatattttttgttttagttagggtaaattagtttttcgatgattattttgtgtaatttatttaacgtatttgttaggtttttgttgaagtttagtatgggaaatttttatagtttacgtttatattttttgttttgtatgattaatattaatttttttttttttttattattattttttagttagtagttttttttggggagttattttaatttatgtggttgggggtagatagtttttattttatatttataagtaggtatgttttttgggtttggttatttatttaggggtggtttagtttaggagtggtttatttttttagttgtagtgattgagttaggatgggtatatgatttaaattaggttaatgagaattattttttttagaatttttgggaaagggaaattttttttttttgatggtattaagttaataggatgtaagtttggaggtcgtttcgtttataggtttggagagtttgtttgagaatgaagttaatgtaggggaagttagagagaagagatatatagaagagagagataaacgtatagaaggtttttggatttagtttgagttttttagttatgtaggttaatgaattttttttttattgaataaaataaaatatttttagttagttttttttatttataatttaattagttgaatatttattattaataataataaaaatttttttgaggattaattgtagttaaggtttgggaataagatttatggtataggtttttgtttttaaggattttatagttgggtagaagagagtttggattttatgttataagagaataaagaatagaaaggaagtagttttgttagttagtaaaatttagtgatattaagggatataggagataagagaagggagagattttaggaggttgggagacggttagggataatgaagagattttggaggagaaggaacgtgagaaggtttaaattttgtggtggggaagtgagaagttgttttaggttaggtttgggggtgggttggttaggagcgtttatgtgtggtttgtttggggaaaatgaggttggaaggggacgaaatgggttagagtagagagatttttttttgggaagtagtagaaggtaaagttaaataaaatatttatttttttgaaaaggtttattgtttattgtgtgtattgggtgtagtgttgagttttagagattttgtagtgaggttttgtttttatggaaaatattatttagtgggatagatagaaataaatagttatgtaaataaaaaggataattttagattatggtg

SEQ ID NO: 47 - DNA, 7317 bp, Artificial Sequence
  chemically treated genomic DNA (Homo sapiens)
gggttttatcgtgttagttaggatggtttcgattttttgatttcgtgattcgtttatcgcggttttttaaagtgttgggattataggtgtgagttatcgtttcgggtttaatttttgtatttttaatagagatagggttttattattttggttaggtttgttttgaatttttgattttaggtgatttatttgttttggttttttatagtgttgggattataggcgtgatttatttttttttttttttttttgaaatagggttttattttgtcgtttaggttggagtgtagtggtatgattttttagtttattataatttttattttttgggtttaagtaatttttgtattttggttttcggagtagttgggattataggtgtgtgttattatgtttagttaatttttttgtatttttagtagagacggagttttgttatgtgggttaggttggttttaaatttttgatttttagtgatttgttcgttttagtttttaaaatgttggtattatatgcgtgagttattatatttagttttaattttgttgttttgaagttattttaagagttattttgattgtttttgtgtgatttatatttttttgttattagttatttttaatatggttaattttaggtttagggttttggggaaaggttagaggagtatattttaagaagatgttttaagtattagagttttgtatgtatagtagagtcgggggttatggtttttgattttttttggttgaatttttttatgggatgttttttagattttttttaatttattttttatatttagttttatagtatttttggttaggtgggtaaggtatgtttgaatgttgttttgatttaagttggattttgtgtaaaattaagtaaattttttttttaaagtttatagaaattttttaaaaagaaaaaaaaaaaagttgggtgcggtggtttacgtttataattttagtattttgagagtttaaggtaggcggattacgaggttaggagttcgagattagtttagttaatatggtgaaattttatttttattaaagatataaaaaattagttagcgtggtggcgtaagtttgtaatttaagttattcgggaggttgagatagtagaattgtttaaatttggtaggcggaggttgtagtgattcgagatcgtattattgtattttagtttgggtgatagggcgagattttgttttaaaaaaaaaaagaaaagaaaagaaaagaaaagaaaaagaggttaggttcggtggtttatgtttgtaatttttgttattagggatattagggaggttgagttaggagaattgtttgaatttgggaagtagaggttgtagtgagttaagattatgttattgtattttagtttgggtaatagagtgagattttgttttataagaaaaaaaagaaatttttaaaaaaaaaaaaattagttggggttaggtatagtggtttatttttgtaatagtattttgggaggttaaggtgtgtggattaattgaggtgaggagtttgagattagtttggtatggtgaaatttcgtttttattaaaaatatataaaattagttgggttcgtggtggtgtatgtttgtaattttagttattagggaggttgaggcggaagaattatttaaatttgggaggtagaggttgtagtgagcggagattatgttattgtattatagtttgggtgatagagtaaggttttgttttaaaaaaataagaaaataaataaataaaaataggtcgggtgtagtggtttacgtttgttattttagtattttgggaggttaaggcgggtagattacgaggttaatagatttaaattattttgattaaaatggtgaaattttatttttattaaaaatataaaaattagttggatgtggtggcgtatatttgtagttttagttattcgggaggttgaggtaggagaattatttgaatttaggaggtagaggttgtagtgagttgagatggcgttattgtattttaatttggtaatagagttagatttcgttttaaaaaaaaaaataaaaaaaaaaaattgggtaagtaattttttattaggaaatgatagagtaagtttttaggtgttttttatattttttatttttttgttttgttttttaaaatatttatttatttattttaagagataggattttttattttattgtttaggttgtagtgtagtggtatgattatattttattgtagtttcgattttttaggttgaagtgatttttttattttagtatttggagtagttggattataggtgttgtgtatattatcgcgtttaagtaattttttttttttaatttttgtagagatggggaataggggggtttttttatgtttgttgggtttaagcgatttttttattttcgttttttgaaacgttgggattataggtatgagatattgtgttcgattaatatttttttttttgtattttttagtttgaatatgggtataaattattaaaaataataaaattatttttgaaggttaattttgattttatttttatatattgaatttattttgtaataattttaagataaagaagttttgttttttttaatttgtttgttttttttttttttttgagacggagtttcgttttttcgtttaggttagagtgtagtggcgcgatttcggtttattgtaagttttatttttcgggtttacgttatttttttgttttagtttttcgagtagttgggattataggtgttcgttatcgtgttcggttaattttttgtatttttagtagagacggggttttatcgtgttaattaggatggtttcgattttttgatttcgtgattcgttcgttttggttttttaaagtgttgggattataggcgtgagttatcgtatttggtttttttttttttttttgagatagagtttcgttttgtcgtataggttggagtgtagtgggcgatttttgtttattgtaggttttgttttttaggtttacgttatttttttgttttagtttttcgagtagttaggattataggtgttcgttattacgtttagttaatttttttgtgtgtgtttttagtagagacggggttttatcgtgttggttaggatggttttaattttttgattttttgattcgtttttttcggttttttaaagtgttgggattataagcgtgagttattacgttcggtttaatttgtttgtttttttattgtagtttgggtgatttaggtttgattattagaggatagattttatttttgttagtaattttaattgttttattaggatttttatttttatgtttttatttatttattttaatattaatttaaaaaataaatagaaataatataaaaaaaaaaataaagaaaatttaataatttgtaaatattagttacggagtatgagatatgaaataaaagaaaaaaaatttttttttttttgggatagagttttgtttttgtcgtttaggttggagtgtaatggtataattttagtttattgtaattttcgtttttcgggtttaagagatttttttattttagttttttaagtagttaggattataggcgtgtattattatattcggataagttttgtatttttagtagaaacggggttttattatgttggttaggtttgtttcgaatttttgattttaggtgatttattggtttcggttttataaagtgttgggattataggcgtgagttatcgtgtttggtcgagaaaaagtttttaatcgtattagtagatattggtttcggggtttttttcggggttatttatatttttgttattttttttagtattaatttatttatggttaaatatagggtgatgtgtaggaatttgaaagtacgttttcgattttagttgtaaaattgtggagttttatatattagattttatattttagtatttttttttattattatatttttgtttttttttatttttatattatttttattatatttttgttttttttataattatattagataaggtaatggttagacgtggttttttattaatttgttttattgggagcggacgagaaaaaaaaaaaagataaattttagaaatgtttttaggttttagttatgtttaggaaaatatttgaaggtttttgcggtgagagtgttatttggtaagggcgtatggatatacgtggagggtaagaaatgaatttgggtttggtgtcgaaatatttttttattgttgtgattttgttttttggttagagtaataatgttcgttgtaaaataaataaataaataatatataaaaaggaaaaggaaaatttagagaaaatgaaaataattcgtaattaacgtgttttttggatgtgaattgttttttttgggagggtaatggagaagtgaggacgtattgggtatttggttcggaatagtcggtagtgggtatattttgtttggtgaattcgatcggggttttgggggattcgttatttaagggtcgaagagtagggtcgttttacgggcgtttttatttggttatttgagtggcgatttggcgtttttttcggagtagtttcggggtttcgtcgtttcggtttttattggttttttacgtagagattaaaggtaggaattttttttcgtaattatttatcgattgaaaatagattttgagttcgttttcgtttttttttttttaaaattttttttatttttaaaatttttttttttaaagggagttatagggtgacgtcgggggagtttgcggaagcgttaatcgcgttggggtttagggcggatttcgtgattgggataggtttcgttttcggttttattttttttattgtgtgagcggttcgggtttaggtttcgttttttttcggaggttcggttattttttttttttatttttttttggtttattttcggtcgtcgtcgttatcgttagtttgtaaggaggattcggtagagggaagaaataatagtcgttattttgtttgtgtgttaggttgggggggagagagggcgagagagagcgggcgagagtgggtaagtaggacgtcgggttgagtgttaattgcgggagttagagagtgcggaggggagtcgggtcggagagaggcggtaggggtcgagatagtggtagggggttcggggcgtacgggttgaggcgatttttagttttttttcgttcgtatatatttttatcgcggtttagtagtcgggtcggcgtcgacgtttaggggggattattatataatttcgcgtttcgcggcgttttttttcgtcgtcgcgggcggtttcgaacggagtttcggggggcgggcgtttttagtatttggtcgtcggcggtgggggtcgtagtagcggtcgtatttatttatttttcgcgggaaaggaaggcgaaggaggggagcgcggcgcgaggaggggtcgtttgcgtcgtcgtcggagcggggttttttcggtgggtttcgcgtcggcgcgggcgtgcgggcggcgttgttcggttcggttttttcggttttttggttcggttagtttcgttttcggcgtttttgtcgcgttttcgtcggtcgtcgcgcgatgtgaggcggcggcgttagtttggttttcggttcgggcgagttttttgcggttattaggggtcggtgcggcggcggcggcgcggagcgcggcggtaggaggagggttcggagggtgggggcgtaggttcgggagggggtatcgggaggaggtgagtgttttttgtcgtttttttttttttttttttttcgttttcgtttttttgtggcgatgagaaggaggaggatagcgtcgaggaggaagaggttgatggcggcggcggagtttcgagagatttcggttgggtaggggtcggtcgtggcgggtcggggattgcgtttttagagtcgcgagttttcgggaattcgtcgtagcggacgcgttcggcgaatttgtgtttttgtgttttttttcgggtttgggtttaggttcggtttttcgtatttgtttttattttttttatcgagttcgtatttttttttagttattgcgattcggcgaagagaaaaaggaattttttttattttttcgggtgtcgtcggagttttttagtttatttttgggtgcggcgcggggatttcgggtcgaagaagagattttttgaggattttggtttttttcgtttgtattttcgaaagaattaaaaatggtcgagaatgtggtggaatcggggtcgtttttagttaagcggtttaaatttttattttcggttttttcggcgttcgttagcgatggtataggttagtttcggtagtttcggttttttacgttttttttaattttttttattcggtgcgtttttatttttttattttttttttttttttttttttttagttttttgttttttaattaattttaaaggtatttgaatgagttggtcgaagacgtttagtagtttaattattttttttgttttttaatatattgattgtaatattatgttatatcggtgtgtgttttggaattagagttcgtaagtgggtgttatatagaaatggtttgtattgttgtttttatgtaatttaatttgggaaatgttaatgtatttgtgtgtaagagtttttatgtaatttaagttttattttttttgtttttggtaaatgaatttcgaattttttttttttattgtatttattgtgttttttttattttttatttttcgaaatttttttttttttgtagaatattttttgttgaggaatagggtgtaaaaaaattttgattttgtgtgtgcgaggtttaagattttaggttagaggtgaagtttaataatttttttattttatttattatttttagttttttttttttttttttttttatttgttttaagaattaatatggagcgtagtttattttatattttttagttttttggtgtgagattaaaatgtttgaaattttgggtttttaggttgggagaataggggtatgttttttgtagtttgtagttatttttttattttaggggaaataagataaataattttgtggagttacgtatttggaaattaaggttagaagttgaaagagttttaattatgaattataaacgtgaattgattgtataaaagtttaaaatgtgtattaggtttggtgtttgtgtgtgtttttgtttttttatatttttaaatatatttggagattaagattttcgtttaaaagttttacgattagtttatttagttgtggattagtttttttgttaggagaagtttagggagattttttttattattt

SEQ ID NO: 48 - DNA, 7317 bp, Artificial Sequence
  chemically treated genomic DNA (Homo sapiens)
ggatgatggaagaagtttttttgaattttttttgataaaggagttagtttataattgaatgaattggtcgtaaagtttttaaacgaaaattttgatttttaagtatgtttaaaagtgtaaaaagataaagatatatataaatattaaatttaatgtatattttaaatttttgtataattagtttacgtttgtagtttatgattggaatttttttaatttttaattttgatttttaggtacgtaattttataaaattgtttattttattttttttaaaatgagaaagtgattgtaaattgtaaagaatatgtttttgtttttttaatttaaaaatttagagttttagatattttggttttatattaaagaattgggagatgtgaaatgaattgcgttttatattgatttttaaagtaaataagaagaaaaaggaaaaaaaagttaagaatggtaggtaagataaaagaattgttaaattttatttttaatttgaaattttggatttcgtatatataaaattaagatttttttatattttattttttaatagaaaatattttgtaaaggagagaaaatttcgaagagtggaaagtagaggaaatatagtaagtatagtaaagagaaaggattcgaaatttatttgttaagaataaaaaaaatgaaatttaaattgtataggagtttttatatataaatgtattggtattttttaaattaaattgtatgagagtaataatataggttatttttatatagtatttatttacgagttttaattttagaatatatatcgatatgatatagtgttgtaattaatgtattaggaggtaaagaaaatggttgggttattggacgttttcgattagtttatttaaatatttttaaaattaattaaggggtagggaattagagagagaggaagaaaaaaaaaatggaagaataaaggcgtatcgagtagaaaagattaaagggaacgtggaaggtcggggttgtcgaaattaatttgtgttatcgttggcggacgtcgagagggtcggagatgagagtttaggtcgtttggttgaaggcggtttcggttttattatattttcggttatttttaattttttcggagatataagcgaggaaaattagaatttttaggaaatttttttttcggttcggggttttcgcgtcgtatttaggggtgggttggggggtttcgacggtattcgagggggtgggggaagttttttttttttttcgtcgggtcgtagtggttggagagggatgcggattcgatagaaaaggtaagggtaagtgcgaggggtcgggtttgggtttaagttcggaggagggtataagagtataaattcgtcgagcgcgttcgttgcggcgaattttcgagaattcgcggttttagaggcgtagttttcggttcgttacggtcggtttttgtttagtcgaggtttttcggagtttcgtcgtcgttattaattttttttttttcggcgttgttttttttttttttatcgttataaggaggcgggggcgaaaaggggggagaggaggaggcgataagagatatttattttttttcggtgttttttttcgggtttgcgtttttatttttcgaattttttttttgtcgtcgcgtttcgcgtcgtcgtcgtcgtatcggtttttaatggtcgtagagaattcgttcgagtcgagagttaggttggcgtcgtcgttttatatcgcgcggcggtcggcggaggcgcggtaaggacgtcgggagcggagttggtcggattagagggtcgagggggtcgggtcgagtagcgtcgttcgtacgttcgcgtcgacgcggagtttatcgaggaggtttcgtttcggcggcggcgtaggcggttttttttcgcgtcgcgtttttttttttcgtttttttttttcgcggaaaataaataaatacggtcgttgttacggtttttatcgtcggcggttaggtgttgggagcgttcgtttttcggggtttcgttcggggtcgttcgcggcggcgggagaagacgtcgcggggcgcggggttatgtaatggttttttttaggcgtcgacgtcggttcggttgttggatcgcggtgggggtgtgtgcggacgggagggggttgggggtcgttttagttcgtgcgtttcgggttttttgttattgtttcggtttttgtcgttttttttcgattcgattttttttcgtattttttggttttcgtagttagtatttagttcggcgttttgtttgtttattttcgttcgttttttttcgtttttttttttttttagtttagtatataaataagatggcggttgttgttttttttttttgtcgaattttttttataggttagcggtagcggcggcggtcggaaatgagttaagggggggtggaaaaggggagtggtcgggttttcggaggggggcggggtttaggttcgagtcgtttatataatgggggaagtggagtcgggggcggggtttgttttaattacgggattcgttttaggttttaacgcggttagcgttttcgtaaattttttcggcgttattttgtggttttttttaaaggggaggattttaagagtggggaggattttaaggggggaggggcgggggcggatttagaatttatttttagtcggtggatagttacgagggaaggtttttgtttttggtttttgcgtaagggattagtgggaatcgggacgacggaatttcggagttgtttcgaggaaggcgttaagtcgttatttaggtggttaaatgggagcgttcgtagggcggttttgtttttcggtttttgggtggcgggttttttaaaatttcggtcgaatttattaggtagggtgtatttattgtcggttgtttcgggttagatatttagtgcgtttttatttttttattgtttttttaaagggagtagtttatatttaaaaagtacgttgattacgagttgtttttattttttttgaatttttttttttttttttatgtattatttatttatttattttataacgagtattattattttgattagaaaataaaattatagtagtggaaagatgtttcggtattagatttaaatttattttttgttttttacgtgtgtttatacgtttttattaggtagtatttttatcgtagaagtttttaagtatttttttaaatatggttgggatttgaagatatttttagggtttgttttttttttttttttcgttcgtttttaatagaataagttagtaaaagattacgtttagttattgttttatttaatgtaattatgggaaaaataaaaatgtggtaaaggtaatgtaaggatggaaaaaagtaaaaatgtaatggtgagaggaaatgttggaatataaagtttagtgtgtgggattttatagttttgtagttgaggtcggagacgtgtttttaggtttttatatattattttgtgtttggttatgggtaaattggtattggaggaggtggtaggggtgtaagtgatttcgaaagaaatttcgaaattagtatttattgatacggttaaaagttttttttcggttaggtacggtggtttacgtttgtaattttagtattttgtgaggtcgaggttagtggattatttgaggttaggagttcgagataagtttggttaatatggtgaaatttcgtttttattaaaaatataaaatttgttcgggtgtggtggtgtacgtttgtaattttagttatttgggaggttgaggtaggagaattttttaaattcgggaagcggaggttgtagtgagttgagattgtgttattgtattttagtttgggcgataagagtaaaattttgttttaaagaaaaaaaaatttttttttttttattttatattttatgtttcgtagttggtatttgtaaattgttggattttttttgtttttttttttatattgtttttgtttgttttttaaattaatgttgggatgaataaataagaatataagagtgaagattttaatggagtaattgaagttgttgatagggatggaatttgttttttaatgattaggtttagattatttaaattgtagtagaaaagtaggtaaattgaatcgggcgtggtggtttacgtttgtaattttagtattttgggaggtcgaggagggcggattaggaggttaggagattgagattattttggttaatacggtgaaatttcgtttttattaaaaatatatataaaaaaattagttgggcgtggtggcgggtatttgtagttttagttattcgggaggttgaggtaggagaatggcgtgaatttgggaggtagagtttgtagtgagtagagatcgtttattgtattttagtttgtgcgatagagcgagattttgttttaaaaaaaaaaaaaaaggttaggtgcggtggtttacgtttgtaattttagtattttgggaggttaaggcgggcggattacgaggttaggagatcgagattattttggttaatacggtgaaatttcgtttttattaaaaatataaaaaattagtcgggtacggtggcgggtatttgtagttttagttattcgggaggttgaggtaggagaatggcgtgaattcgggaggtggagtttgtagtgagtcgagatcgcgttattgtattttggtttgggcgaaagagcgagatttcgttttaaaaaaaaaaaaaaagtaggtaaattgaaaaggatagaatttttttattttaaagttgttataggatgaatttaatgtgtaggagtgagattaagattggtttttagggataattttgttatttttaatagtttatatttatatttagattaaggagtataaaggaaagaatgttggtcgggtatagtgttttatgtttgtaattttaacgttttaggagacgagggtgggaggatcgtttgagtttagtaaatataaagagatttttttattttttatttttataaaagttaaaaaaaaaaaattatttaggcgcggtggtgtatatagtatttgtagtttagttattttagatattgaaatgggagaattattttagtttgggaagtcgaggttgtagtgaggtgtaattatgttattgtattatagtttgggtaatagagtgagagattttgttttttaaaataaataaataaatattttaaaaaataaagtaaagaaatgagaaatgtggaggatatttggaaatttgttttgttattttttggtgggagattgtttgtttagttttttttttttgtttttttttttgagacggagtttggttttgttgttaggttggagtgtaatggcgttattttagtttattgtaatttttgttttttgggtttaagtgatttttttgttttagtttttcgagtagttgggattataggtgtgcgttattatatttagttaatttttgtatttttagtagagatggggttttattattttggttaggatggtttagatttgttgatttcgtgatttgttcgttttggttttttaaagtgttgggatgataggcgtgagttattgtattcggtttgtttttgtttgtttgtttttttgtttttttgagatagagttttgttttgttatttaagttgtagtgtagtggtatgattttcgtttattgtaatttttgttttttaggtttaagtgattttttcgttttagtttttttggtagttgggattataggtatgtattattacggatttagttaattttgtgtatttttagtagagacggggttttattatgttaggttggttttaaattttttattttagttgatttatatattttggttttttaaagtgttgttataggaatgagttattgtatttggttttagttggtttttttttttttaagagtttttttttttttttatgagatagagttttattttgttgtttaggttggagtgtagtggtatgattttggtttattgtagtttttgttttttaggtttaagtaatttttttgatttagtttttttagtatttttagtagtagggattatagatatgagttatcgagtttggtttttttttttttttttttttttttttttttttttttttttgagatagagtttcgttttgttatttaggttggagtgtagtggtgcgatttcgggttattgtaattttcgtttattaggtttaagtaattttgttgttttagtttttcgaatagtttggattataggtttgcgttattacgttggttaattttttgtatttttagtagagatggggttttattatgttgattgggttggtttcgaatttttgatttcgtgattcgtttgttttggatttttaaagtgttgggattataggcgtgagttatcgtatttagtttttttttttttttttttaaagagtttttgtaaattttaggaaaaagatttgtttagttttatataggatttagtttgaattaaagtagtatttaaatatattttgtttatttggttaaaaatattgtaggattagatataagaagtggattgaaggagatttgaggaatattttatgagaaaatttaattaaaagaaattagaggttatggttttcggttttgttgtatatgtagaattttgatgtttggggtatttttttgagatgtgtttttttggtttttttttaggattttgaatttgaaattggttatgttggaagtggttgatggtaagaaaatatggattatataaagataattaaggtgatttttaagatggttttagaatagtagaattgaagttgggtatggtggtttacgtatgtaatgttagtattttggaagttgaggcgggtagattattagaggttaggagtttgagattagtttggtttatatagtaaaatttcgtttttattaaaaatataaaaaagttagttggatatggtggtatatatttgtaattttagttatttcggaggttaaggtataagaattgtttgaatttaggaggtggaggttgtagtgagttgagagattatattattgtattttaatttgggcgatagagtaagattttgttttaaaaaaaagaaaagaaaaatagattacgtttgtaattttagtattgtgggaagttaaggtaggtggattatttgaggttaggagtttaagataagtttggttaagatggtgaaattttgtttttattaaaaatataaaaattaggttcggagcggtggtttatatttgtaattttagtattttgggaggtcgcggtgggcggattacgaggttaggagatcgagattattttggttaatacggtgaaattt

SEQ ID NO: 49 - DNA, 6815 bp, Artificial Sequence
  chemically treated genomic DNA (Homo sapiens)
ttgtttgcgaattaaaaatttagagtttttttgtgaattatgttgttaagaattgtagatttaagttttaagattgtacgaatttaaattttgattttatggttttagttggtatgaagatataaagataattttttagtaaaaatagttttgaaagatcgggcgtgatggtttatgtttataattttagtattttgggaggttgaggcgggtggattatttgtggttaggagtttaggattagtttggttaatatggtgaaattttgttttaattaaatatataaaaaaattagttgggtgtggtggcggatatttgtaattttagttatttagggaggttgaggtaggagaatcgtttgaatttaggaggtagaggttgtagtgagtcgagattatattagtgtattttagtttgggtgataaaagtgaaattttgttttaaaaaaaaaaaaaaatggtagaatgttatatggaaagttaatttttagagatagtaatttagatatttataatattatattgtttttttaagtatttatattaataaattaattaatatttgttgatttaatatggttagggatagtgttgggtttttataatttttaagtaattttagttagattttgtttttaaggagtttatgagtagtatgaggagataaaaaatagataaataattttaatttaggaagaatttgataaatgtatgataattattattagaatttagaggagaggaaattttttttgaatagagattaaaggaaggaataatgaatgtggtagtatttgggttggatttattataagaggtatgtttttttttgataagttaagaaagtggggatttaaggtagaagaaaagaaaagttttgagtttttggagtattaaaattttgtttggttgaagtataggttatagtcggaggagatggattaggaaggatcgttatgggtagagaggaagttttgaatttatgggggaagttatgatttgggttaaagatagagttgggttatgttaagatggattttgaagtagtaaaaaaaaatttaagaaagtaaataggttgtagggtttaggatgaagttcgggaggaaagggtagagtggtttttaggaggtcgttaggataggtaaggtaatgggttttaaagggagtggtcgaaatgtaatggaaaaagagagattgtaaagttagaaggtttaggaattgttttttgattaggtgtggaaggtaagggaaaattagttttcgaagaagatagtgagattttaatttgggtggttggagagatagtgatgttgggtatagatacggggaagttgagaggaatattatgtttgagaatggtgatttatatttgaataagtttgtaatgtttagtagatcgttggaaaagtggggttggagatatatttaacggaggagttagattaatttttatttttttttatttgagagagttagtaagttacggttggaacgtgtgtgtttagtaggagagggtagggagggaagttaagagagttgggagttcgagtgaagtttttgttaaaggtagaagaggaaagtcggcgtagtatagtatatttttttatttatgtttattaagtttagggataaggtttattaagatgagtttggaagagaatgttggagagaaagtggttaagaaaattgtttttattgaattttttgggttaattttgattgtaagtttttgaataattaaagtttgtgaggagatagttaatttttttattttttttatgttaatagtgaataattgtagatttttttttttttttttttttttttttttgttttttttttttttttttttgaatatttttgtttttttttgggattggtttagagtatgggtggttattgttgatttataggaggtattattgttattaataaagggtaatagtttttttttttaatatttatttatatttagtatttatttttaatattgattatggagagagtttttttgtgtttaaatattgtaatattgggggttttttaaagtataaaaatatatatttgtatgatggtattattaatatttttatggttttttattttttttttgtattggttttaagagttatttataaattttttagtaattgtatagtgttttagggttagagatcggttatttttggtattgtgattagagttatttaatatttaaggtggtgattaatgtttggtaataaagtttttattgggtgttatgtgttttgggattttgagcgtgggtattttaggagtattttagtattgcgtgttagtattatggtcgagagaatagttgagaaagtggttaagaggtggatttatgtgaacgttattgggaaatgagagatttcgtttttaattacggttagtgtaattcgaaagtttaaaattagtttaaaataaaggtatttatttttattttatgtttatattttaggtttttaataatacgtattttttatatgtttatagaaagtagttaattgagttatttatggaaaggtttgtgggtttggttaacgaagtggaggagtattatattttagttggaaatatatttttagaatgttaaaatatttattttaaagtttggttttttggtgtaatcggaggtatggtaatgtttttgtttagagattgggggttagggttagtaaggtatttgatttatatgtattttagaaggtttttattgttaaattatattttttcggaaaaattatttatgttttattttgtaaatttgatatttatatatttttgattggtattttattttagtcgtaagattatgatttatagtaagtttgtttttttttttgtttggggtggtagtagaaagtatagggtattttttagtttttaagggtaggggtaaaggggttggggttttttttttttagtatagttttttttggttgtgttatattgttttttgtgagtagatagtaagtttttttttattttttattgttatttatttagcgttgtgtagtagtttagttgcgtgtttgtcgggaggggttgttaagtgttttgtttattggttgtttttcgaatttttgttattttacgtataaatatatttatatattttttttgtttagtttatatattgagttattcgtatatgcgagtatatttttttttttttttttattttttcggtttttgatttttataagtttatggaatatttttggaaagacgtttttgatttagtagggtaggtttgttttgatttttttttttgtagttttagtattttgagaaagtaatttatttttttggttagtgtttgtattttagtagggagatgaggattgttgttttttatgggggtatgtgtgtgtttttttttttttttaggatttgtaggattttttgtgttatttgtatataatttggtaggtttatattttttaagagttttatgaagtgttttttgtatgtgttttaaaaaggtatttgaaaattgaaagtgtgatttatggaaattaaattatttgtaaaaaattgttttggaaagtaatgattgttggttataaagggaaatatttgcgatgtatttaatgtgtttttaattttttatttgttgataatttatagttattaatgttaaattcgattttggttttagttatatttgtatattgtttaataatggtttatttttgtaagaattagataaaatgtatatttgatataaaatagttaaaaatgtaatttttagtaatagtaagtttggtatttagatagattatgaatatttcgttagatattttgttgggtgtttgggatagtaattaaaataaagtattgatagttgtattagagtttattaggttgtagtaaaggaagtttatttaaaagtataaattatttaagattatagacgtatgatatattttatttattttttgtttttttaatatgtatatatatatatatatatatatatatatatatatatgtgtgtgtgtatgtgcgtgtgtatgtttaatttttaatttagttaaaaatttttttttatttgttttttatttggatatttgattttgtatattttagtttaagtgaatcgagaagatcgagttgtaggattaaaggatagatatgtagaaatgtattttaaaaatttgttagttggattagatcgataatgtaatataattgttaaagttttggttcgtgatttgaggttatgtttggtatgaaaaggttatattttatatttagttttttgaagttttggttgtataattaatttgtggaaggtatgaatatttatgtgcgttttaattaaaggtttttttgaattattttttatatgagaatttttaatgggattaagtatagtattgtggtttaatataaatatataagttaggttgagagaattttagaaggttgtggaagggtttatttattttgggagtattttgtagaggaagaaattgaggttttggtaggttgtatttttttgatggtaaaatgtagttttttttatatgtatattttgaattttcgtttttttttttttagatgttttttgttagtttttttagttgttaaatatagttgtttgtggttggttgcgtatgtaatcgtatattttattttatttgttttatttcggttatagtgtagttttttttagggttattttatgtatatattacgtatttttagttaacgaggagggggaattaaatagaaagagagataaatagagatatatcggagtttggtacggggtatataaggtagtatattagagaaagtcggtttttggattcgtttttcgcgtttattttaagtttagttttttttgggttatttttagtagattttcgtgcgttttcgttttttggtcgtgaaatttagtttttatttagtagcgacgataagtaaagtaaagtttagggaagttgttttttgggatcgttttaaatcgagttgtgtttggagtgatgtttaagttaatgttagggtaaggtaatagtttttggtcgttttttagtatttttgtaatgtatatgagttcgggagattagtatttaaagttggaggttcgggagtttaggagttggcggagggcgttcgttttgggattgtatttgttttcgtcgggtcgttcggttttatcggattcgtaggttttcggggtagggtcggggttagagttcgcgtgtcggcgggatatgcgttgcgtcgtttttaatttcgggttgtgttttttttttaggtggttcgtcggtttttgagttttttgttttgcggggatacggtttgtattttgttcgcggttacggattatgattatgattttttatattaaagtatttgggatggttttattgtattagatttaagggaacgagttggagtttttgaatcgttcgtagtttaagatttttttggagcggtttttgggcgaggtgtatttggatagtagtaagttcgtcgtgtataattatttcgagggcgtcgtttacgagtttaacgtcgcggtcgtcgttaacgcgtaggtttacggttagatcggttttttttacggtttcgggtttgaggttgcggcgttcggttttaacggtttggggggtttttttttatttaatagcgtgttttcgagttcgttgatgttattgtattcgtcgtcgtagttgtcgttttttttgtagttttacggttagtaggtgttttattatttggagaacgagtttagcggttatacggtgcgcgaggtcggttcgtcggtattttataggtattcgcgttcgcgtcgttcgtcggggtggtcgtcgcgttcggtaggagggagggagggagggagggagaagggagagtttagggagttgcgggagtcgcgggacgcgcgattcgagggtgcgcgtagggagttcggggcgcgcggtttagttcgggggttttgcgtgtagttcgcgttgcgtttagagttaagttttttcgtcgggtagttgaaaaaaacgtattttttatttatttatcgttcgtgcgagaggtagattcgaaagttcgggttttttaataaaatatacgttggaaaattagataaagtagtagttatttgtgggggaaaatatttttaggtaaataaatacggggcgttttgagttatttgggaaggtttcgtttttggtatttaaagttgggggtgtttggagttagtagagtttagtagagttttatttatttttttaatgtttttgtttaatgtgttttttaaatttttttttatttagattatttgattggaaatatgttagttatgatgatgattttttgggaagcgatttttgttattcgttttttttttttttttattttacgttttggggttttagagagcgattgggagttgaatgggtttgatttcggagttagttggttgagttcgcgttggagcggattgttggtatgtgatttttgatagtcggaaatttgtaggtgtttcgcgagtttaaaataagttatatggaagtataagtgtttaaaaataattttttgttagtttagtgataagtttgttttattcggggagaatgtttcggagtggcgtgcgggttagttagggtttgcgtttcgtagttattgtggaaggagcgcggtcggtttaggatataggagattattttgtgattttaatggcgaaggttgtgtgtttttattttaatttttttttttataagaattgttttttttttttttttttttttttttatttttttttgtttagttttttttttt

SEQ ID NO: 50 - DNA, 6815 bp, Artificial Sequence
  chemically treated genomic DNA (Homo sapiens)
aaaaggagaaattgggtaagagaaaatgggagggagaggagagggagaaagaataatttttgtagggaaaaaaattaaaatgaggatatataattttcgttattgaagttataaagtggttttttgtgttttggatcggtcgcgttttttttatagtggttgcgaggcgtagattttggttgattcgtacgttatttcggggtatttttttcgggtgggataggtttgttattgggttggtaggagattatttttaagtatttgtgtttttatatggtttgttttaaattcgcgggatatttataaattttcggttgttagaagttatatgttagtaattcgttttagcgcggatttagttagttaatttcgaaattagatttatttaatttttaatcgttttttaaagttttaggacgtggggtggggaggaggggaaagcgggtgataggaatcgttttttagaaagttattattatagttgatatatttttaattaaatagtttagatgaaaggaaatttggggagtatattaaataaaaatattaaaaggataaataaaattttgttgagttttgttaattttaaatatttttaattttaaatgttaagagcgagatttttttaagtgatttaaagcgtttcgtgtttatttgtttggaggtgtttttttttataaataattgttgttttgtttggttttttaacgtgtgttttgttaggaagttcgggttttcgggtttgtttttcgtacggacggtaagtgggtggagagtacgttttttttagttgttcggcgagagaatttgattttgaacgtagcgcgggttgtacgtagaattttcgggttgggtcgcgcgtttcgggttttttgcgcgtattttcgggtcgcgcgtttcgcggttttcgtagttttttaggttttttttttttttttttttttttttttttttttgtcgggcgcggcggttatttcgacgggcggcgcgggcgcgggtatttgtagaatgtcggcgggtcggtttcgcgtatcgtgtagtcgttgggttcgttttttaggtagtagggtatttgttggtcgtggggttgtaggaaaggcgatagttgcggcggcgggtgtagtagtattagcgggttcggagatacgttgttgagtggggggaaattttttaggtcgttggagtcgaacgtcgtagttttagattcggggtcgtaggggaggtcggtttgatcgtagatttgcgcgttggcggcggtcgcggcgttgaattcgtaggcggcgttttcggggtagttgtatacggcgggtttgttgttgtttaggtatatttcgtttaggggtcgttttagggggattttgagttgcggacggtttaggggttttagttcgtttttttggatttgatgtagtagggttattttagatgttttggtgtggagggttatggttatggttcgtggtcgcgggtagggtgtagatcgtgttttcgtagggtagaaggtttagaaatcggcgggttatttggaaaaagagtatagttcgaggttagaggcgacgtagcgtatgtttcgtcgatacgcgagttttggtttcggttttgtttcgggagtttgcgggttcggtgaagtcgggcgattcgacgggagtaagtgtagttttaggacgaacgtttttcgttagtttttgggttttcgggtttttaattttaagtattggtttttcgagtttatatgtattataaaggtgttggaggacggttagggattgttgttttgttttgatattggtttaaatattattttaggtataattcgatttggagcgattttaaagagtagtttttttgaattttattttatttgtcgtcgttgttggatagaggttgagttttacggttagggggcgggggcgtacgaggatttgttaaaggtggtttagggaagattgggtttaaaataaacgcgaaagacggatttaggggtcggttttttttaatgtgttgttttatgtgtttcgtgttagatttcgatatatttttgtttgtttttttttttgtttgatttttttttttcgttggttagaaatacgtagtgtgtatataggatgattttggggaggattatattgtaatcgagatagggtagatagaatggggtgtgcggttgtatacgtagttagttatagatagttatatttagtagttgggggaattgatagggggtatttgaggggaagggggcggagatttagggtatatatataggaagagttgtattttgttattaggagaatgtaatttgttaggattttagtttttttttttgtaaaatgtttttaaagtagatagatttttttataattttttgagatttttttagtttgatttgtgtgtttatgttggattatagtattgtatttggttttattaggaatttttatgtgaaggatgatttagaaaaatttttggttagggcgtatatgggtgtttatgttttttataggttggttatgtaattaaaattttagaaaattgaatataaaatgtgatttttttatattaaatataattttaggttacgaattaaagttttggtaattatgttatattgtcggtttggtttagttaatagatttttaaaatgtatttttgtatgtttattttttagttttataattcgattttttcggtttatttgggttaggatatgtagaattaaatatttagatgaaaaataaatagaaaaaagtttttaattgaattaaaagttaaatatgtatacgtatatatatatatatatatatgtgtatatatatatatatatatatatatatatatattaaggagataaaaaataggtgaagtatattatgcgtttataattttggatagtttatatttttgaataaattttttttgttgtagtttaatagattttgatataattattaatattttgttttaattgttattttaaatatttaatagagtatttgacgaagtgtttatggtttatttaaatgttaagtttattgttattaagagttatatttttgattattttatattaagtatatattttatttaatttttataaaaatagattattgttggataatatgtaaatgtagttgaagttaaaatcgagtttagtattaatgattatagattgttagtaaataaagggttaaaaatatattaggtgtatcgtagatatttttttttatggttagtaattattattttttaaagtaattttttatagatgatttaatttttataaattatatttttaatttttaaatgtttttttaaaatatatgtaaaaagtattttatagggtttttaaaaaatgtgaatttgttaaattatatgtaaatggtataaagaattttataagttttgaaagaaaaaggagatatatatatatttttatggagaatagtaatttttatttttttgttaggatatagatattagttagaaaggtaagttgtttttttaaaatgttaaagttatagagagagaaattaaaataagtttattttgttggattaagaacgtttttttagaaatgttttatgggtttgtagaagttaagggtcgagagagtgagaaggaaggaaggaatgtgttcgtatgtgcgagtggtttagtgtgtgaattaggtagagagagtgtgtggatgtgtttgtgcgtggaatggtagggattcgggaagtagttagtaggtagggtatttggtagtttttttcggtagatacgtagttgggttattgtatagcgttggatgaatggtagtggggagtgaggggagatttgttgtttgtttatagggagtagtgtggtatagttagagaaagttgtattggggaggagaaattttagtttttttgtttttatttttggaggttggaaagtattttatgttttttgttgttattttaagtaagaggaaaaataggtttgttgtgaattatagttttacggttaaaatagaatgttagttaaaagtgtatggatattaagtttataaaataggatatgggtggttttttcgaaagaatataatttaataataaaagttttttgggatatatgtggattaaatgttttattggttttagtttttagtttttgaatagaggtattgttatgttttcgattgtattaggaaattagattttggaataaatgttttggtattttagggatgtgtttttagttgaaatgtaatatttttttatttcgttaattaaatttataaatttttttatgaatagtttagttgattgttttttgtaaatatgtgaaaaatacgtattattaaaagtttaggatatgaatataagataaaggtagatatttttgttttaaattgattttaggttttcgagttgtattgatcgtgattgggaacgaggttttttattttttagtggcgtttatatggatttattttttgattatttttttaattattttttcggttatagtattaatacgtaatattgaggtgtttttagagtgtttacgtttagggttttaggatatatgatatttaatggaggttttgttgttagatattagttattattttggatattaaatgattttaattataatgttaggagtggtcggtttttggttttgggatattatgtagttattgagagatttatgagtggtttttgagattagtataaaaaagaaatagaaagttataaaaatgttaatgatgttattatgtaaatatatgtttttgtgttttgaaagatttttagtattgtagtgtttgagtataggagagttttttttatagttagtattgaaaataaatattggatataaataaatattgaaaagaaagattgttattttttgttggtgatagtggtgttttttgtaggttaataatggttatttatgttttagattagttttagaaaaaagtaagagtatttagggagggaggagagaggaataggggaaaggagaaggaaaggaaaggggatttgtaattgtttattattgatataggaagaataagaaggttagttgtttttttataggttttgattgtttagagatttataattaaagttagtttaagaagtttagtaaaggtagtttttttaattattttttttttagtatttttttttaaatttattttggtgagttttgtttttgggtttggtgagtatgggtgggaaagtatattgtgttacgtcgattttttttttttgtttttggtaaaaattttattcgggtttttagtttttttggtttttttttttatttttttttgttggatatatacgttttagtcgtgatttattggtttttttaggtgaagaagggtaaagattgatttggttttttcgttgaatgtgtttttagttttatttttttagcggtttgttgggtattgtaggtttgtttaaatatgagttattatttttaaatatggtgttttttttaattttttcgtgtttgtgtttagtattattgtttttttagttatttagattaaaattttattgtttttttcgagggttgatttttttttgttttttatatttaattaagaggtaatttttaagttttttagttttataatttttttttttttattgtatttcggttattttttttgagatttattattttatttgttttaacggttttttaaggattattttgtttttttttttcggattttattttaaattttgtaatttgtttatttttttggatttttttttattgttttaggatttattttgatatgatttagttttgtttttaatttaaattatagttttttttatgagtttagggttttttttttgtttataacgattttttttagtttatttttttcgattgtaatttatgttttagttaagtaaaattttaatattttaagaatttaaggtttttttttttttttattttaaatttttatttttttggtttgttaggggaaagtatgttttttgtaataggtttagtttaaatgttattatatttattatttttttttttagtttttatttaaagaaaatttttttttttttgaattttagtagtagttattatgtatttattaaattttttttgaattagagttatttatttgttttttatttttttatgttgtttataagttttttgaggataaggtttggttagaattatttgggaattatgagaatttagtattgtttttggttatgttaagttaataaatgttggttaatttattgatatagatatttaaaaggataatgtaatattataggtgtttggattattatttttaaaagttaattttttatgtgatattttattatttttttttttttttgagatagagttttatttttgttatttaggttggagtatattggtgtgatttcggtttattgtaatttttgttttttgggtttaagcgatttttttgttttagtttttttaagtagttgggattataggtgttcgttattatatttagttaatttttttgtatgtttagttgagataggattttattatgttggttaggttggttttgaatttttgattataggtgatttattcgttttaattttttaaagtgttgggattataggtatgagttattacgttcggttttttaaaattgtttttgttagaagattatttttgtatttttatgttaattgaggttataaagttaaaatttaaattcgtataattttgaggtttaagtttgtaatttttggtagtatgatttataagagagttttgaatttttagttcgtaagtag

SEQ ID NO: 51 - DNA, 5880 bp, Artificial Sequence
  chemically treated genomic DNA (Homo sapiens)
attagtaatatatatgagtgtttttattttaggatttaattttaagtatattagaaatttttttttaaattgatgagttaaaatattttttaaggtagggcgcggtggtttatgtttgtaattttagtattttgggaggttaaggtgggcggattataaggttaggatttgagattagtttgattaatatggtgaaattttatttttattaaaaatataaaaattagttgggtatggtggcgggtatttgtatttttagttatttgggaggttgaggtaggagaattatttgaatttaggaggtagaggttgtagtgagtcgagatcgcgttattgtattttagtttgggtgatagagtaagattttgttttaaaataaataaataaataaataaataaataaataaataaataataaaaataaaaaaattttttattttttaagtgtatagtataatgtattgatttggggtgtagttaaaagtttttttttttatatttataagttgtttgtaatttttttatttgagggagtttatagatagttattagttgaaaatggtagtattgagagtgagagagtatatagttatatagtattagtttttttgatatttttattttttttttaggttttattttttttttaaatttttgttattttttatatatagtgtttttgaagttattgattattttttatttttttgtgaggattttatgtttttttttggaattatttttatttgtttatttttttggttaattttgttgtttaattttatattttttttttatttatttgatgtaattgtgtaaattagatttttaataatttgttttatatattgttttaatataataaattttaaaagttattgttttatttaatattttatttaattttgagtaaattttatttgattttaattatagtaattatttaaaataagtagcgttattttagtttgttgtttttttgtaattgtttttagaaatttattttttttaataacgtgtaatttttttataatgttatagtaagttaattgtagagaagttattaatgaatattattttattttattaaataatagtaagggaaatataaaaatttaaatagttttatatgtaatttaaaaattttttaaatttaaaaatggatttttttttggaggggggtagtttttttttaagaatttttattttaaaatttaaatgggattttaaaatataagtaaataaatgttaaagttttttggtttttgttttgttattttatgtttgaaattttgttaaaatgaaatttttcgtttaaaagggttggtatttattaaattgatgttttaaagatatttttaaaaagtagtggaaattttgtttagttttttatgtttttgttttgtagatagaatagttgtttttgtagatattttttaagattttatattttttgaaaaataaatttttagtttttttattgtttttagtaagtgggtttattggttttttttagtgttaagtagagaagataaataattgttaaattagaagttagtgtttgagtattaaggtatagaaaggatagaagagatagtgttttagtaagtattaatgtagagaaaggatagaagagaaagtgggagaaagaaaagagggtggtttaatcgtttatagttaagagggatatatttattttaaaattttaggttgttttaataaaatcgagttgtagcgagattagttgtttatttatacgagaatattatttttagttattatgaagattaaagagttaaaagatatgagttcgtttaaagaatttaaaagggaaaatatgaagttatcgtaatacgtagtaaaatttgaggtttaatagcgtagcgtttgagagtgttagtttattaaagggagggagaaggggcgtagagtttatgggggtttgggaaggagtgataagtttttggaaatggaaattaaagttattagttagcgaaaattattaatatttttaaaaatatataatattaataatatataaaagttttaaaaaattaataagatattgtgggatataaaaaaaggtagaaatgaaaattatagaatgttaagtgaaaaaattgaaatttatttatagtcgaatagtttgtatttttaaaagtaatgatttgaagtagtaagtaaaagtttttagtttttaagattttttttttatttttaatttttttttttttttagtgtaaaagttgtttaagtagtgtacgtcggaattatttttacgtgagtttttttttaatttcggttttaattttttttttttttgttattatttttagattttaatttttttttttttatttagtatttgttttagggataggataaagaggaggtagcgagttgaaaaaagttttgtggtttgggatatttgggtttttgttgtgttattttttttatttttttacgtttttaattacgtgattaagaagggtcggaattttgtgaatggagacgaaaggtggttgttggggcgggcgggatttcgtttttttttttaaagcggttaattttttagcggagcgttgaggggttagtaataaataataatgggttggggatttacggttcgttattggttgcgggaagaatttcgtcgggatttaattcgaagtttcgttttttcgcggttattttggatattcgttaggttcgggttgtagagaaggtttttggaaattgttgtttagattataggcgttgggttattttaggagtgtagggtggtggaggatttttgttattgattttttgtttggttgtatttttagatagtatttatgagttttattgtttagtttcggggtttaggcgttttttggaatttttttttggtcggggttaaaatgtagttttcgtttaaaatgtttataggtgcgcgcgttgtgaatttcgatttagtagttttcgggaatgcgcggggtttgtttttgttgtttatagttattggttgtttttttagtaataagtgttgattgtttgtttgtttgttttttttttaagtagattttttttttgtttaggttcggggttgagtgttgtgcgtttttatattttattttaatgtgtttttataacgttttatttaaggaaggaaatttttaaatagaaattgagaattgtagtacgttttttaacgggcggaatagttgtcggaaacgttttttggttattagttttggttataaatgaattttaatagtattgagtttttggttttattttcgcggtttttcgttcgttgttggatattggttttttaaagtgacgttttattgttttgagttttataggaggattagggtaagtggttttagagatgtagtttttattgtttaacgttttagttattgtttttgaaattcgagttattttatcgttcgtttttaattttgggttttggttgtttaaaagttggagaggaagtgaaagcgttaagtatagtaagtgatatttttcgttttcgtgtatatataataaaagtttaggaaacgtgcgggttttaggatatacgagtaattttaagtattttttttttttttttatagttatagtggattggaagtatttttttttagtgtatacgtagggattattttgatttatatttttttatttagtttgttttgttgtttttttattataatttttgttaattagtaattttgtattttttaggtgttttttttatagattttttatgtttttgttttacgaacgataggatttaattttagttgaggatgattgtttaaaaaatgtttcgataaattataatggtgatggtgggttttgaaaaacgggaaaataaattgggttaaaagttgagtgggaatgaggatagagagcgaggtgagtttttagttagggtaagagtagagaggttggagattttgaggggagggtagttgaataaggcggtacgggttttgtggatcgcggttttaagggtatattagaatcgtataatagtattttaaggaaattagtttaatagtggatttaatattttaataatgggaattggcgattcgaaatatacggttttagtatttttaggcgttttaataataagtagcgggttatagaggaaatcgagttttttcgtggcgtttttaggttgaggatttagcgtttatcggtcgagtattttttagggtagaggggcgagggagattcgcgggaaggggtagtaagtcgtttgattgatagttcgaaatttgattttgtgaaagagacgcggagttaatgggaggtagcgatttattagtttggattggaggtttttggaggagaagtagaggaaaaattatcgaattgagttttgttagaggcgttttcggtttttaagggggaagtgttgggttataattaatgtttttattaaatttggagggaagtttttgtagtttttcgtttagcgtggtttttaggtgggtttttttaataattttttatgtttttttagataattgtatggttgtgggtcgtaaaaattattttgatgaaagaggtgttttcgtttttttagtttcgttaggtgtaaagtaagtttcgttgatcgttattgttagttttgtatacgtttgcgaattagagttgttcggggtatatcgatcgcgtagggaaatatcgagagtgtaaataaatatatcgttttttgttcggatttttgttattatcgaaaatatgtaaattgtgaattttgttggttttttttggatttaggtgaaggaggcggtgtagggagggttatttttgtgaatgggattgtcggagggtaattagttatgtaaatttaagagttttatttatgatttttttttaagtttaaaagttattttgtttttttttaggttgatagaagtttagattttgaggaaatttttagttaaatgtttaaaatataaaatattgagttgagatttgcgaagagtagtagtatggatggattttatgattagtaagtgttttatatggttattaatgtgagtgattagtttgaaagttgttgtttataaatttgatttcgtcgggggtggggagagggagaaaatgagaagggagggggtacgggggttgggattgtagatatttatttgttttgttgttattgtagggcgattttgtttttagaagtttagtttttaaaatgagtttattttttagtgatttggataaggtatagttttgtttttaagatttttttttttgattaaagtgtttaatatgagtggaagaggagatggagggtagtagtagttgttgtatttaaagtttttggttgggtttgtttgttatattgaaaagaatgaagttgagataaatgttgatattttttgtttatatggggtgtttttgtttttttttttttttttattttttttttttttttttttttatttttttattttttttgttttttttttttgtgggggtggggtggggaggaggggttgtttaagagagaataaaatttattgttttaatttagtattgaattagtttaaaaataattttaagtgtaaatgttttaggttgttttgatgttgagatattatgaatatatgattgataaatagtaatgtgttaagatcggtattgggaagtaattttttttgtttgtttaatataagtttttattgttaaataagtgagaaaatgaatattagagttgatattatggatttttatttttttatttagagaagatttattagatttatgtatgtatgtttgtgtgtgtgtgtgtgcgcgcgcgtgtgcgtgtgtgtgatttgaggtttatatttttttaaaggattttatttttttttttgtaga

SEQ ID NO: 52 - DNA, 5880 bp, Artificial Sequence
  chemically treated genomic DNA (Homo sapiens)
tttataaagggaaagataaaattttttaaaagaatgtaaattttagattatatatacgtatacgcgcgcgtatatatatatatatagatatgtatatataagtttaatggattttttttgaatagaaaaatagaagtttatagtattaattttaatatttatttttttatttatttgatagtgaaagtttatgttaagtaggtagggagagttgttttttagtgtcgattttagtatattattatttattaattatatatttatggtattttagtattaaaataatttgaagtatttatatttaaagttgtttttaggttggtttaatgttagattaaaatagtgggttttatttttttttggatagttttttttttttattttatttttataaaaaaaaaaagtaaaaagagtagagaaatgaaaaaaaaaaaaaagagaaaatgagaaaaaaaaaagaaataaaaatattttatataaataaaaagtgttagtatttgttttaattttattttttttaatgtggtagataaatttagttaaaaattttgagtgtagtagttgttgttgttttttatttttttttttatttatgttgggtattttaattagaaaaaggggttttaaaaataaaattatgttttatttaaattattgaaaggtaagtttattttgaagattgggtttttagaagtagagtcgttttatagtggtaataaagtagataagtatttgtaattttaattttcgtgttttttttttttttattttttttttttttttattttcgacggagttaagtttataaatagtaatttttaaattgattatttatattggtgattatgtaaggtatttgttggttataaaatttatttatgttgttgtttttcgtaaattttagtttagtattttatattttgagtatttagttggagatttttttaggatttggatttttattaatttagaggggaataagatggtttttaggtttaaaaaaaaattatgaatgaagtttttgaatttgtatagttaattatttttcgatagttttatttataaaaataattttttttatatcgttttttttatttggatttaaagagagttaatagagtttataatttatatattttcggtagtagtaaaaattcgaataagaggcgatgtatttatttatattttcgatgtttttttgcgcggtcggtgtatttcgggtagttttgattcgtaaacgtgtgtaaaattagtaatggcgattaacgagatttgttttgtatttaacgggattaaagagacggagatattttttttattaggatagtttttgcgatttataattatgtaattatttggagagatataaaaagttgttggaaagatttatttgaaggttacgttaggcgaaaggttgtaaaaatttttttttaaatttaataaaaatattaattatagtttagtattttttttttggaagtcgaaagcgtttttgatagagtttaattcggtggttttttttttattttttttttaggggtttttaatttaaattgatggatcgttgttttttattggtttcgcgttttttttataagattagatttcgggttgttaattaggcggtttgttgttttttttcgcgggtttttttcgtttttttgttttagggggtgttcggtcggtaggcgttgggtttttagtttggaagcgttacggagagattcgattttttttgtaattcgttgtttattgttaaggcgtttggggatattgaaatcgtgtgtttcgagtcgttagtttttattattggggtgttaggtttattattgggttggtttttttaaagtattgttgtgcggttttggtatatttttagagtcgcgatttataaagttcgtatcgttttatttagttgttttttttttaggatttttaatttttttatttttgttttgattaggagtttatttcgttttttatttttatttttatttagtttttggtttaatttattttttcgttttttaaaatttattattattattatggtttatcgaaatattttttaaatagttatttttaattaaaattagattttatcgttcgtgggatagaaatataaagaatttataaggaaggtatttaggagatgtagaattgttgattagtagaggttgtgatgggaggataatagagtaagttaggtgaaaaagtataagttaaaatggtttttacgtgtgtattgggaaaaggtatttttagtttattgtggttgtggggaggaggagggagtgtttggggttgttcgtatattttagaattcgtacgttttttgagtttttgttatgtatatacggaggcggagggtgttatttattgtatttgacgtttttattttttttttagtttttaaatagttagagtttagggttgggggcgagcggtgagatggttcgggttttaaggataataattaggacgttaagtagtgagggttgtatttttgaagttatttgttttgatttttttatgggatttagaatagtaaagcgttattttaaggagttagtgtttaatagcggacgggaggtcgcggggataggattagggatttaatgttgttgaaatttatttgtgattagaattagtgattaaaagacgttttcggtagttgtttcgttcgttaggaaacgtgttgtagtttttaatttttatttgaaagtttttttttttaaatagaacgttatggagatatattaaaatggagtgtaagagcgtatagtatttaatttcggatttgggtaggagaaagatttatttaaaaaagaagtaaataaataaataattaatatttattattgggaaaataattaataattatggatagtaaagatagatttcgcgtattttcggaaattattaaatcggagtttataacgcgcgtatttataagtattttgagcgggaattgtattttaatttcggttaaggagagattttaggaagcgtttgggtttcgaggttgaatagtgaagtttatgggtattatttgagggtgtaattaagtagggggttaataataagggttttttattattttgtatttttggaataatttagcgtttgtaatttgagtaatagtttttaaagattttttttgtagttcgagtttgacgggtatttagggtaatcgcgagggggcggagtttcgggttaggtttcggcgaggtttttttcgtagttaataacgagtcgtaaatttttagtttattgttgtttattgttgattttttagcgtttcgttaggagattggtcgttttagggaagggggcggagtttcgttcgttttaatagttatttttcgtttttatttataaaatttcggttttttttggttacgtggttgggggcgtggaggggtagaggaaatgatataataaaggtttaagtattttaaattataaaattttttttagttcgttgttttttttttgttttgtttttgaaatagatattagatgaggaaaaagaggttggggtttgggagtaataataagagagaaaaaaattaagatcgaaattaaaggaaggtttacgtggggataatttcggcgtgtattgtttagatagtttttgtattagaggaaagaaagaattgagagtggggagaaagttttaaggattgggaatttttgtttgttgttttaagttattgtttttaaaggtgtaaattgttcgattgtagatggattttagtttttttatttaatattttgtaatttttatttttatttttttttgtattttatagtgttttgttagttttttaaagtttttatgtattattagtattatatatttttaggaatattgatggttttcgttggttgatagttttagtttttatttttaaagatttattatttttttttaggtttttataagttttgcgttttttttttttttttttagtggattggtatttttaggcgttgcgttgttaagttttagattttattacgtattgcggtggttttatatttttttttttgagttttttaaacgaatttatattttttaattttttgatttttatagtaattgaaaatgatgttttcgtgtgaataagtagttagtttcgttatagttcggttttgttgaaatagtttaaaattttgagataaatgtgttttttttgattgtgaacgattgaattattttttttttttttttttatttttttttttgttttttttttgtattgatatttattgaaatattattttttttgttttttttatgttttgatatttagatattagtttttagtttggtagttgtttattttttttgtttggtattgggaaaaattaatagatttatttgttgaagatagtggaagggttgaaaatttgttttttagaaaatgtaagattttggaaaatatttgtaaaggtagttgttttgtttataagataggaatataaaaagttggataaagtttttattattttttgagaatgtttttaaaatattagtttagtaaatgttagtttttttgaacggaaaattttattttggtaggattttaggtatagaatggtagagtagaggttaagaggttttgatatttatttgtttgtattttgaaattttatttggattttgaaataagagtttttgagagaaagttatttttttttaaaaaaaagtttatttttgagtttggaaagtttttaggttgtatgtaaaattatttaaatttttatattttttttgttgttatttaataaagtaaaataatatttattagtgatttttttatagttaatttattatggtattatgaagaaattgtacgttgttaaagaaagtgaatttttaaaagtagttatagaaaggtaataagttaaaatggcgttgtttgttttaaatggttgttataattaaaattaaatgaagtttgtttaaaattgagtagagtattaagtaaaatagtaatttttaaaatttgttgtattaaaatagtatgtaaggtaaattgttaaagatttagtttgtatagttatattaaatagataagaaaaagatataaaattaaatagtaaaattggttaagaaaatgaataagtgaaaataattttaaaggagaatatagagtttttataggagggtgaaagataattagtggttttaggaatattgtatgtgaggagtagtagaaatttgagaggagggtggagtttgggaagaaggtaagggtattaaggaaattgatattatgtagttgtatatttttttatttttaatattgttatttttagttggtgattatttgtaaatttttttaagtagaggaattgtaaataatttataaatgtggaaaaaaaaatttttaattgtattttaaattagtatattatattgtatatttaaaaaataaagaatttttttatttttattatttatttatttatttatttatttatttatttatttattttgagatagagttttgttttgttatttaggttgaagtgtagtggcgcgatttcggtttattgtaatttttattttttgggtttaagtgatttttttgttttagttttttaagtagttgggagtataggtgttcgttattatgtttagttgatttttgtatttttagtagagatggggttttattatattggttaggttggttttaaattttgattttgtgattcgtttattttggttttttaaagtgttaggattataggtatgagttatcgcgttttgttttaaagaatgttttaatttattaatttggaaggaagtttttaatatatttagagttggattttaggataagggtatttatgtatattgttggt

SEQ ID NO: 53 - DNA, 9539 bp, Artificial Sequence
  chemically treated genomic DNA (Homo sapiens)
atgtggtatttttttttttttttattttttgagatagggttttattttgttgtttaggttggagtgtagtggtgtaattatggtttattgtagttttaatttgttgatttttttatttgagttttttaagtagttgggattataggtatgtattattatattcggttaattttttttttttgtagatacgtgtttttgttacgttgtttaggttggtttcgaatttttgggtttaagtaatttatttattttaattttttaaagtgttgagattataggtgtgagttatcgtattttagttataatgtagtaggtatttttatataaaggaatattatttagttatgaaaatgaatgaagtattgatatatgttataatatgaatgaattttaaaaaatttatgtgaagtaaaagaaggtagttataaaaggttatatattatatgattgtatttatatgaaatgtttaaaatagataaatttatagagataaagagatttgtgatggttcggggatgggaggagagggaaatggaatgggagggtgtatgttaatagatatagggttttttttgggggtgatgaaaatgttttggaattaggtagtggatagttatataatttcgtgatatattaatcgttttgttatatattttaagagtgaattttatggttaagagtaaattttatggtatgtgaattatgttttaataaatagaaaaagaaaaaaaagaatgaattattgatatatacgataatgtggaagaatgttatagatattatgttgagtaaaagtagtatatattgtatgatgtgtttttatttttatgaagtgtaaaaataggttaaaaaaattttaggtattatatggtgtttatgggtattaatatatggagtgatggagtaaaaatatttatgaggaagataaatattaagtttaaggtagtagaaggagagagggaaatggaattagtataagagtatttgtaatatcgtatattttttaaaaataatttgaagttaataaggtaaaatattaatgtttgataaaagtagatgtttgttatagtattttttatattttttattttttaaaatagttaattaatagtttgtttttgagggtaaacgtttgattttttaattaggttttggttgatatttgttttggtgtttttgatattatagtttgttaggttttgtttttattttgatgggttttatagtatagaagaggtataaatagtataaatgttatggggtttggattaagtaggggttttagaattttagaagatgttaggagggagtgagttagttagggaaggttttcgagaagagaggatattgaagaagagttttaaatttaggtttgacggagaagacgcgcggttaggatattttattttcgttttcgttttttttaaagtttgatttggttttattgatttttttatttgtttatttttagttgtttttttgttggttgaattgtcgtcgtagatttttgagtttgcgttttttttacggggatgggggagggaatggggtgaggtttggttttatagtttcggggtttttagtttttgttggaggtagggttttggggcgttttattttttatttttggtttttttttttgagcgttttgtgttttttagaaatgaagaaatggggtgagtttagcggttaaatttttgttttagtttttagatatgtttcgagtttgttattttttgtgaggatagatttttttatgttgcgatcgttgtttttaataataataatgatgatgataatttttatttatagagtatattatttatggtgtgttagtaggttttgtgttgagtggtttttatttacgtggggggttaggattttattcgttttttagatgaagaaattgaggtttagagggcgtttggtttaggaattatatagtaaattatatagtaaattagagttgagataagaatttagggttttggaggaatatttttatttttatatatttatgtagaattagtttggaggtgagggtaattatatatatttgtattataaggagttggtgagaatgcgatagaattatgggtggagagcgtttagtatagtgtttggggttatttagtaaataatgtcgttgttgttattattagtttattaatgttattattaatattagaattaaataagtttcggtaatatagcgagattttatttttattgaaaaaaaattttttgttgggtgtggtggtatgtatttgaagttttagttttttaggaggttgaggtgggaggattatttgagtttaggaggtggaggttgtagtgagttaagattgttattgtattttagtttgagtgatatagtgagatattgtttttaaaaaatatttagtacgtattattattattattgttgttagaattagaatagttttagaattagtgttagtattaataatagtattagtgttagattaaaattagtattagtattagatgagtattattatgaaaattagtatgtttttatagaagtagagagtagaatagtggttattagtagatgggagggtaggaggtagggagggatggggagaggttgttaatgggtataaagttatagttagataggaggtataagttttggtgttttaatgtatagtataatgattagagttaataataaatgtatattttaaaatagttgaaagaggcgttttcgaatgtttttattataaagaaaagataaatgtttaaggtgatgaatatgttaattattttgatttgattattatataatgtatatatgtaataaaatattatgttttattttatatatatgtataattattatgtgttaattataaatttaaagaaataaaattagttttagtgttagtattaatattataatattggtattatttttagtgttagtatattattagtattagtattataagtagtagtagggttagaaagggttatgtatttttttttgtatgtagtaggtatttaataaataaataggggtatttaatatttattgagattttagatttaagtaagttaagattatgtaatatgggttaaaatttatttagtttttttagttattgtatggagtggtttattggggtatattattattttatttttatagatgaggagttaaattttagaggggatggtaatttttttaaggttatttgatttattagtggttagggtagtttatgaacgaggatgagttggttttagagattattttttgaaattattgttatttaagttagaggtgtttttgtattcgttttttttattattgatgagggtttagtatggggcgtggtatattagtaggagtttaataaataggaatttatgggtttgtttttttttttttttaaattttttattgtatatgaggatattgaggtttagaggagtgagataagaatggtaagatttttttagggtgggttagtgggtaagttgattttattgatttggggttttatttttggtttttgttttttgtaggttttagtttttttatttgtagattaggtgggtaggatagttttttgttttacgtgtgtatgtgtgttagatgtttttatatagaaaaagtgtttaggttaggtataagtttatgtgaggtttatgagatattgtggttgttgttattaatatttggaggaggtggggtagggtaagagtgtggggattggggtgcggaggtttagttatattttggttgttttttgttgagggttgagggtagagttataggttatattaatttatatttttttattttatttgtatgggtattatatgtttagggtgtgatttagtttgtttggatttttttttgagtttgtttttgaatatttttttgtttttgtttttttttttagttttttatttttgtttttggttttttttttttttaggttttatttgttatttttgtttatttttgttttttattttttttttgtttttttttatatgtttttaatggtttttggtttttttcgggtgtttcgttttttttgttttttttttttttttgtgttttttttttgtttttttttacgtttgtttttttttttatttatttttgttattttttttttttttatttttattttttttcgtttatttttgtttttgtttgtttttttgtttttgttttttttattttatttttttttttttttattttattttatttttcgaggaattatttttggtttttattttagtttttcgtttttaaggtagtatggcgggtaagaagttgaggttattgtttttgggtgtttttatttttatatttttattttaagatagtttgttattgcggcgttaatagttacggtcgtttatatttgataagatttatttgttgttttagggtaggtcggagttggcgtaagttttagtggggcgttaagtgagtgtgtttttgtttttcgttagtattggtttggtttgtaggtttagtttgggttattaaggtattttataggttttagtttaaatttagtagaatttttttgagttttattttttttatttgtaaaatgggtatagttatattttttttttttttgtagttaggaagacgtatatatataggagtttagtttatatcggtttcgtataaattaagggttttattttttgaaaagtttagtgaagttatgaaattatatttgttatttttatttattttggttttagtttattttgtttgtttggatattatagtttacgggagtttaggtcgagcgaggtttaagaatttttagggtgggtagggagggtggaagagggtttttagtgtttaagaggtgttttataagtatgggattcgtttttttttttggattgttttatttattggggtattagttattttttggggaggagggaggagggagaagggagggagggagggagggaggaagggagttttaaaggttaaggttagttaggatattttttgggattatattgagtttgttatatttttaaggcggtcgaatttttcgtaattattagtttaggttagttttagtttttagagagtttttattaaggtaattttgggtttgttgtttttatttttatgtttgttttaggttttttaatttatagttggtttttaaagtgttagttagttttgaatttttttatagtttttttaatttatttgtttttttaatttttatttttattttaaatttattttttaaattttatttttttttgtttttttatttatttcgtttaagatatttatattttttggatttttttattttgttcgttatatttttaggtttgttttttttaaatattaattttgttttttaaaatatgattttatttttttaaattttttttttgttttatatttgatttttatttatttaaatttgtttttgtttttttgattttttttttaaattttatttttttgtttttaaattttttatttgttttataacgttttgtttttgttttattttttttgagtttttaaatttgtttttgatttgttaaattttagttttatttttttattattatttttgttttttaaatttattttttgtttttaatgatttttttttgattttcgtaaattatttattttttttaattttttgtttgtttagtaaaatatttttgttattttaaatattaagttaattttttaaaatttgttttgtcgtatgaatttttatgtttgttttttttaaatcgtattttagttttaaaatatattttattgtttttttgaatttttttagttttaagtttttttttattttaattttattttggttttttaaatttttttttattagttatattttgtttgtttaaatagatttttgatttttaaattttattttttttttagaaaaatttttgaattttttagatttttttatgatttttagaatttgatttttatattattttttaattttatttttgatttttaaatttcgtttcgattttttaatttcgtttgtttttataatttatttttgagtttaaaatgtgtttttgaatttttaagttcgtttttgttttataatttcgtttatatttgtttttttataaattttatggttatattttaaatttttttgatttaattttatatttgatttttaaattttatttttatttttttttaagttttatatttgttttttagattttatatttgttttttttagttcggtgagatttttttttgagggttgggattggaacgttatttggggtgaggggttggggtcgagggagagtggagggtgttagttgttgtttgttgtcgtcgttggggtaatatttattttagtggggtagttgataaggagtttttatattttttagtttcgagataaattttatttttgttcggagagtgataattgggggtgaggaggttgggtttttgttatgggaggggtgggtagttttggatttattaacgtgtgaggtgtaggggttgggggtagtggggttggagggagattatggtgggtaaggtggagttgaggggatgagggaatagtggtgaaagagtgagtagaagatatataatgagatagggaagagagggagaaatagggagagatgggaagagagagatagagatatagagataaagagtaagagataaaagagatatgaagagaaaggaaaaatagagagagagaaatttaacgagtaagagatagagatagatagatggtcggagaaaaagaaggaaagattcgggagtagaaaaggagatagaaatgtagagatatacgtaggtagtattgtgaagaggtagagattaatatagaattagagatagagaggaaagagatggagattaagatggggaagtaaaatattttttttagagagtaatagtaggtattttggggttgagaaggtgttggcggtgggtatatttgtggtttattttttttttagtataatttttaagtttgggtttgttttttagtttgtttatattatgggttatgtaagtaggagtgaggggtagtttgaagatagttttttagtttagttttgttattttattttatagatatagaaatagagtaggttagtataatagggttagggttagtattttaggttttttattttgagttgtatgtggttgggtacggttaggggtatgggattagtaagaggtacgtggatataaggttagagggtttaaagagagggaaatagagggaatagataaataagtaggaagagtgggagagatgtagagatgtttagagagataggagaggagagggagaaagtaagagtaatagaaagagagagttagagagagaaatatgggaagatagaaaagaagatagaaaattattaaatattataaaagtatagaaagaggtcgggcgtagtggtttacgtttataattttagtattgtgggaggtcgaggtgggtcgattatttgaggttaggagtttaagattagtttggttaatatggtaaaatttcgtttttattaaaaatataaaaattagttgggtgtggtggtatgtgtttgtaattttagttattagggaggttgaggtacgagaattatttgaatttgggaggttggggttgtagtgagttgagatcgtattattgtatattagtttgggtgatagagtgagatttcgttttaaaaaaaaaaaaaaaagaaaaagaaaaagtatagaaggagaagataagttatattatagaaatatagaaagttggggaagttatagagttagatttgagagggaatagagagttaggggaaagagttttaggggatagagaagtggagagttagatgatagatatatataaggtaaaataggtaaagggttattttataggttttagtttagttttagtttattattatttttaatatagtagatggggaaattgaggtttgggaattgaaagagtttgaaagtagaattttggtgggtttttttaggggagagggtatcggtagaggtattttttatttgttattttttttagaggaagttagtggttttggggtgattttaaaagttgggcggggaaggtagagataagtagtggggggtattgatttttttttaattaagaagtagggaggaattaagggggttttttgtttgtagacgtaatagaggtggagggaggagggagttaagttcggaaattatggggtttttgagaaagttagagggtaagatataatagatagggatgaagttggggagtagaggatggtgaattttaaagttttgggtgaagtgattaagaggtaagggattttggttttgtatgttattttatttttatttagatttttttagagggggagggaagaaaggacggggggacggggagaataagaggaagtggaggaggggaggagaggagatggggaaagggagaaaaggatgaatagaaaagggaggagaaggatgaagaaattggaggggaggagaaaatgagtagtaggagaaaggagtggagagtagatgtagataggggaagagaggtcggaagtggtggtttatatttgtaattttagtattttgggaggttgaggtgggaggattatttgaggttaggagtttaagattagtttgggtaatagagttatattttatttttataaaaaaaaaataaaaattagttaggtttggtggtatatatttgtagttttagttatttaggaggttgaggtaggaggattattgtcgggaggtagtggttgtagtgagtcgagatcgtgttattgtattttagtttggtaatagaggagattttgttttaaaaaaaagtgtgtgtggatgggggagagggagataaggtgtgtgagaaaggtagaaaaggagaatgaagataaaaagagaaggaggataaggaagaggggaaataggaaaggagaaggaggaggttaaggaggaaaagaagaaggtggaggagaaaaaggaagtaggagagaatgagaaaagagtggaaagagaaggaaatggggaagaggggggtaaagaagagatgggaagaagagagacgggagaaagataggaggaaaagggaaggggggaagaagagagagaatggaaggaagaagggagaggtagaagtagatgagagtggaggaagagcgagaggagggaggagaggaaagataaacggtaagagggggagaacgaggaggaagatgaaaggaggggtatataggagtggaacggggagatgtaggagggaaaagagaggagagggaggaagagaaggaggggaaggagaggggagattaaggtgaggaggaggggggaatggggaggtgggaaggagaaatatggagattgaggtgatggagtgggaggagggggaaaggagggaagaggagtaggtgaaaggaggtgggggggaaggatttttgtgtttgaggattttttttgttttcgtagg

SEQ ID NO: 54 - DNA, 9539 bp, Artificial Sequence
  chemically treated genomic DNA (Homo sapiens)
tttgcgaggatagaaggggtttttagatatagaaattttttttttttatttttttttatttgtttttttttttttttttttttttttttttattttattattttagtttttatattttttttttttatttttttattttttttttttttttattttagttttttttttttttttttttttttttttttttttttttttttttttttttttttgtattttttcgttttatttttgtgtgtttttttttttattttttttttcgtttttttttttttgtcgtttgttttttttttttttttttttttcgttttttttttatttttatttgtttttatttttttttttttttttttatttttttttttttttttttttttttttttttttttgtttttttttcgttttttttttttttattttttttttgttttttttttttttatttttttttttttttattttttttttatttttttttgtttttttttttttttttatttttttttttttttttttgattttttttttttttttttttgtttttttttttttttgttttttttttttttttgtttttattttttttttttattttttttatatattttattttttttttttttatttatatatatttttttttgaggtagggttttttttgttgttaggttggagtgtagtggtacgatttcggtttattgtaattattgtttttcggtagtgatttttttgttttagttttttgagtagttgggattataggtgtgtgttattaggtttggttagtttttgttttttttttgtagaaatggggtatgattttgttgtttaggttggttttgaatttttggttttaagtgatttttttattttagttttttaaagtattgggattataggtgtgagttattattttcggtttttttttttttgtttatatttattttttattttttttttttattatttattttttttttttttttaatttttttatttttttttttttttttttgtttatttttttttttttttttttatttttttttttttttttttttatttttttttatttttttcgttttttcgtttttttttttttttttttttagaagagtttgggtgagggtgggatggtatgtaggattagagttttttgttttttggttattttatttaggattttggggtttattattttttgttttttaattttatttttatttgttgtattttgttttttaatttttttagaaattttatggttttcgggtttgatttttttttttttttatttttgttgcgtttatagatagaaggtttttttagtttttttttattttttggttgggggggggttagtattttttattgtttatttttgtttttttcgtttaatttttgaaattattttaaggttattgattttttttgaagagggtggtaggtgggaggtatttttatcggtatttttttttttggagaggtttattagagttttgtttttaggtttttttagtttttaggttttagtttttttatttgttgtattgggggtggtgatgggttggggttgagttgagatttgtgggatggttttttgtttgttttgttttgtgtgtgtttgttatttagttttttatttttttattttttggggtttttttttttgattttttgtttttttttaagtttgattttgtagtttttttagttttttgtgtttttatgatatagtttgttttttttttttgtgtttttttttttttttttttttttttttttgagacggagttttattttgttatttaggttggtgtgtagtggtgcgattttagtttattgtaattttagttttttaggtttaagtgattttcgtgttttagtttttttagtagttgggattataggtatatgttattatatttagttaatttttgtatttttagtaaagacgaggttttgttatgttggttaggttggttttgaatttttgattttaagtgatcggtttatttcggttttttatagtgttgaggttataggcgtgagttattgcgttcgatttttttttgtgtttttgtaatgtttgatgattttttgtttttttttttgtttttttatgtttttttttttggttttttttttttgttatttttgttttttttttttttttttttatttttttgaatatttttgtattttttttattttttttgtttgtttgtttgttttttttgtttttttttttttgggttttttgattttatgtttacgtgttttttattagttttatatttttgatcgtatttagttatatgtagtttaggataaggagtttggaatgttggttttggttttattgtgttggtttgttttgtttttgtgtttgtagggtggagtgatagggttagattagaaggttgtttttaaattgttttttatttttgtttatatgatttatggtatagataggttaaggggtaggtttaggtttgggagttatgttaggaaagagatgggttataagtgtgtttatcgttaatatttttttagttttagggtgtttgttgttgttttttgaagagagtgttttgtttttttattttggtttttattttttttttttttgtttttaattttgtgttagtttttgtttttttatagtgttatttgcgtgtatttttgtatttttatttttttttttgttttcgggttttttttttttttttttcggttatttgtttgtttttgttttttattcgttgagtttttttttttttgttttttttttttttttatgttttttttgttttttgttttttgtttttgtgtttttgtttttttttttttatttttttttgttttttttttttttttttgttttattgtgtgttttttgtttatttttttattattatttttttatttttttaattttattttatttattatgatttttttttagttttattgtttttaatttttgtattttatacgttggtgagtttagggttgtttattttttttatggtaggggtttagtttttttatttttagttattatttttcggatagagataaagtttatttcgaggttgggggatatgaaagttttttattagttgttttattagagtaagtgttgttttaacggcggtagtaggtagtagttggtattttttattttttttcggttttagttttttattttaggtaacgttttaattttagtttttaagggagggttttatcgggttgaagggagtagatataaggtttagggggtagatatggggtttagggggagatagaggtggaatttgaaggttagatatggggttaagttagagaggtttggggtgtagttatggagtttgtggggaggtagatatgggcggggttgtggagtagagacgagtttggaagtttagagatatattttgggtttaggaataggttgtgaaaatagacgaggttgggggatcggggcgaagtttgagagttagaaataaagttgagaagtagtgtgggagttagattttgagggttatagaaaagtttggggagtttaagggtttttttggaggagagatggagtttaggagttaaagatttgtttgggtagatagaatgtggttagtaaaggggagtttgagaagttaagatagaattggagtagagaaaggtttggagttggagagatttagggagataatgagatgtgttttagggttgagatacggtttggggaaggtagatatgagggtttatgcggtagaatagattttggggagttgatttggtgtttgaagtgataaagatattttattgagtaggtagggagttgggagagataaatggtttgcggagattagagagaagttattgggaataaagagtgggtttgaaaggtagagatggtggtaagaggatggagttagggtttggtagattagagataggtttgggggtttagagagagtggggtaaagataaggcgttgtagagtagataaggggtttgggagtagaaaagtgaggtttggaggagaagttagggagatagagataagtttgggtgagtggaaattagatatgggatagggaaaggatttggggagataaagttatgttttgggagatagagttagtgtttaggggagatagatttaggggtatagcgagtaaagtgaagggatttagaggatatagatattttggacggagtggatgagagggtagaaagaggtggggtttagggggtagatttggggtagaaatgggagttggaaagataggtgggttggaggagttgtaaagggatttagggttggttgatattttggggattagttgtgggttggggagtttggagtaagtataagggtaggggtagtaggtttagggttgttttggtgggggttttttgggggttgagattgatttgggttggtggttgcggagggttcggtcgttttggggatgtggtaagtttagtgtgattttagggggtgttttggttggttttggtttttgaggtttttttttttttttttttttttttttttttttttttttttttttttttttagggagtggttggtgttttagtgggtggggtagtttaggggagggggcgggttttatgtttgtggggtattttttgggtattggaggtttttttttattttttttgtttattttggggatttttggatttcgttcgatttaggttttcgtggattgtagtgtttagataagtaaaataggttgaaattaagataaatgaaaatagtagatatggttttatgattttattgggttttttagagagtaaagtttttaatttgtgcggggtcggtgtgggttagatttttgtgtatgtgcgtttttttggttgtagggagagaagggatgtggttgtatttattttgtaggtgagaagagtgaggtttagagaggttttgttggatttgaattagagtttgtgggatattttgatgatttaggttaagtttgtaggttaggttagtgttggcgggaggtaggggtatatttatttagcgttttattggggtttacgttagtttcggtttgttttggggtagtagataagttttattagatgtaggcgatcgtggttgttggcgtcgtagtaataggttgttttggggtgagggtgtgggggtaggaatatttagggatagtggttttaattttttgttcgttatgttgttttggaggcgggaaattgaggtgggagttagggatgatttttcgaggagtgggatagggtaggaaaggaaaggggtggagtgggagagatagaggtagagagataaataaaaatagagataggcggagagagatggaaatggggagaaagagagtgatagagatgaatagagaaggagatagacgtggaaagaggtagagagagggtataaaagaaaaggagagataaagagggcgagatattcggggagaattagagattattaaagatatatagagagaggtaaagagagaatgagagatagagatggatagaagtgatagataaaatttgaaagggaaagaggttaaagatagaagtggagaattgagaagggagatagagatagagggatatttagagatagatttagaagaaggtttaggtagattggattatattttgggtatgtggtgtttatgtaggtaggatgggaggatgtggattgatgtagtttgtggttttgtttttagtttttagtaggggataattagaatgtggttaggttttcgtattttagtttttatatttttgttttgttttattttttttaaatattaatgataataattatagtgttttatagattttatatagatttgtatttaatttgagtattttttttatatgaaagtatttgatatatatgtatacgtgggataaggagttgttttgtttatttagtttatagatggggagattgagatttataaagggtagaggttaagggtggagttttaggttagtggggttagtttgtttattggtttattttggagggattttattatttttattttatttttttgagttttagtgtttttatatgtaatgggagatttgaggaggaaagagagtaagtttatgaatttttatttattgagtttttgttggtgtgttacgttttatgttgaatttttattagtaataaggagaacgaatataaagatatttttgatttaagtggtagtggttttaggagatggtttttagagttagtttattttcgtttatagattgttttaattattaatggattaggtgattttgggagagttattattttttttggaatttagttttttatttgtaaaaatggggtaataatatattttaataagttattttatgtagtgattggggagattaaatgagttttaatttatgttatatgattttaatttatttgaatttgaaattttaataaatattaagtatttttatttatttattgagtatttattgtatataagggagagtatatagttttttttaattttattattatttatagtattaatgttaataatatgttgatattaagagtaatattaatattgtaatattgatattgatattaaaattaattttatttttttaaatttatgattgatatataatagttgtatatatatatggggtaaaatatgatgttttgttatatgtatatattgtgtagtgattaaattaaggtaattagtatatttattattttaaatatttattttttttttgtgatgagaatattcgagaacgttttttttagttattttgaaatatatatttattgttgattttagttattgtattatgtattagaatattagaatttatgttttttatttaattgtagttttgtatttattgatagtttttttttatttttttttgttttttatttttttatttgttggtaattattattttattttttatttttatgaggatatattaatttttatagtaatatttatttaatgttaatattaattttaatttaatattaatattattattaatattaatattaattttaaaattattttaattttaataataatagtgataatgatacgtattaaatattttttggggatagtgttttattatgttatttaggttggagtgtagtgataattttggtttattgtagtttttattttttgggtttaagtgatttttttattttaattttttgaggagttgggattttaggtgtatgttattatatttagtaaaaaatttttttttaatagagatgaagtttcgttatgttgtcgaggtttgtttaattttgatattaataatagtattaatagattaataataatagtagcggtattatttgttgagtgattttaggtattgtgttaagcgttttttatttataattttatcgtatttttattagttttttgtggtgtaagtgtgtataattgtttttatttttagattggttttatataggtgtgtggaaatgaagatgtttttttagggttttgggtttttgttttaattttgatttgttgtgtgatttgttgtgtgatttttgggttagacgttttttgagttttagtttttttatttggaaaacgggtaaagttttagttttttacgtgggtaggaattatttagtatagggtttgttggtatattataaatggtgtgttttgtaaatgggaattattattattattattattattagaagtagcggtcgtaatatagggaaatttgtttttatagggaatggtaggttcgaggtatgtttaagagttaagataagggtttggtcgttggatttattttatttttttatttttggagagtatagagcgtttaggaagagaagttaagggtgaggagtagggcgttttagagttttgtttttagtaagagttggaaatttcgaggttgtgaggttaggttttattttatttttttttttattttcgtggagggggcgtaggtttagaagtttgcggcgatagtttagttagtaaggaggtagttgggagtgggtagataagggaattagtggggttagattaggttttgggggagacgagggcgggggtggggtgttttggtcgcgcgtttttttcgttaggtttaagtttgagatttttttttaatgtttttttttttcggaagttttttttgattggtttatttttttttggtattttttggggttttagagtttttgtttggtttaggttttatggtatttgtattgtttgtgttttttttgtattgtggagtttattagggtggggatagagtttgatagattgtggtgttaaaagtattaaggtaaatgttaattaaagtttggttaaggagttaagcgtttgtttttagaaataaattgttggttgattgttttaaaaaatggaaagtataaagggtgttgtaataagtatttatttttgttaaatattaatattttgttttattgattttagattgtttttaaaggatatgcgatattatagatgtttttgtattgattttatttttttttttttttttattgttttgagtttggtgtttattttttttatgagtatttttattttattattttatatgttggtatttataaatattatatgatatttggggtttttttggtttgtttttgtattttatggaaatggaagtatattatatagtatgtgttgtttttgtttagtataatgtttgtgatatttttttatattgtcgtgtgtattaatagtttatttttttttttttttttttgtttattgagatataatttatatattataaaatttgtttttaattataaaatttatttttaaaatgtatagtaaagcgattagtatattacgaggttgtgtaattatttattatttaattttagaatatttttattatttttaaaaggaattttatatttattaatatatatttttttattttatttttttttttttttattttcgggttattataaatttttttgtttttatgaatttgtttgttttggatattttatataaatgtagttatataatatgtggttttttgtaattgtttttttttattttatataagttttttaaggtttatttatattgtagtatgtattagtattttatttatttttatgattgaataatatttttttgtatgaaaatatttattatattatagttaggatgcggtggtttatatttgtaattttagtattttgggaggttgaggtgggtggattgtttgagtttaggagttcgagattagtttgggtagcgtagtaagaatacgtgtttataaaaaagaaaaattagtcgggtgtggtggtgtatgtttgtggttttagttatttggggggtttaggtgggaggattagtaagttgaggttgtagtgagttatgattgtattattgtattttagtttgggtaatagagtgagattttgttttaaaagataaaaggaaaaagaaatgttatat

SEQ ID NO: 55 - DNA, 17421 bp, Artificial Sequence
  chemically treated genomic DNA (Homo sapiens)
  unsure (515, 1325, 1345, 3705, 3707, 5320, 5410, 5417, 5420, 5426)
  unsure (7028, 7082, 7179, 8249, 8252, 8254, 8269, 8275, 8278..8279)
  unsure (9222, 9233, 9261, 12655, 12689, 12792, 13398, 14469,15562..15563)
  unsure (15565, 15570, 15574, 15580, 15585..15586, 15589..15590, 17255)
ttatttagagaaaatgaaaatttaatttatgttaagatatttggggtgaagggaagtgttataaaattcgattggggggatggttataattttataaatttattaaaatttattgaagtgtatttttaaaataaatgaattttatagtatgttagttatattataataaggttattttaaaaataaaaatattttgagatattattttatatttgttggtattagtaaatgttaaaatattggataatgtattatgtttttaaaggtatgggggagacggtttggggtaagcgtttattgatgtatttttgggttggggtgggtaataggacgttgttaaatatataaatatatttacgttttgagttgggaattttatttataggattttatttgatatatatgttttatatttgaaaaatgtataaggaaatttattatagttttatagattatggtaaaagtttggaaataaaagatgtttgtttataggtgaaaggttatgttattgttanaaaaaaaaaaaaaaaaaaaattagagagagagagaaagaagggatgtattaaaggaaagagtagttttttgtatattgatacggtattattttaaaataaaatttgggtaaaaataaaggtgtagtatagggatgatagtgatgtgttattatttgattaaaaattggggtaaggaaaaaaaatatatatatttgtttatatattaatagaatttttttggatggaaaataaaaaaagttgtaaataatggttgatattttatttgggtttggaatttggttttgggtggttgggaatagggatggaaaaaagatttttatggtgtattttttgatttttgttgaaattatatagatagatagatgatagatagatagatagatagatagatagatagatagatagatagatggaaaaatatatatatagttatatatatatatatatatatatatattttgtataggaaaacgagattaaaatgtataatgaaaattttttgattataaagtaaagatggaaaaaagtttgttaggaagaaaagttgggggaaaattttagtcgttggttaaaatataaagaaataagaatttttttgttttattattaggaatgtaaaaaaaaaaattattttgtagagtaatttgtttgtttttggtaaatttgaagattggaatgttatacggtttagttattttttttttaggtatatgagaagtttttatatatgagtaagaaagagatgtggttaaagatatttatggagtttgttaaaaaaataagaaaaagaaattaagggtttttttagntttttcgtaatagtgcggtnttttttttttttatttttattttttttatttttttgacggttattaggtattaaatcgtcgcggagcgcgaggggggaagtatcgtagaggagttgttatgtattaaatttataagaatttttataagttaagaggtgggatagatttgaggtaaacgcgaaaagggaaggtttaaaaggagattttttagtatgtttgtgttttgggtttgaaagtgttttttattttattaggttgtttagtagagtgaggagaggaattttgagtttaagtagggaattcggtgaggaggaggtttttttttttttttattgagtttttttagtttttttgagtttttacgttatttgttttagggagaagtgggttgagtacgggttttgaagttaaatttatttggagttgattttagttcggttatttattttttgtgtggttcggtataagtttttttttttttttgagtttttgaggattatatgttataacggataggaagtttatgtttaggagaaggaaagtttatgttattttaagtttatatttggttgtttttagtttttaggttgaaattttgtatattagatttattattttttgggttgataaaatggatattaggttggaatgtatttttttagatgtttttatatgttttatgtatatatgtatgtatagttagaggagggttatgatgttttgtatagtattcggtattttgttttttgtatttaaagatttgttttagagatttatttatgttaataaatagagttatttattttttttaattattatattatttagtgaatggttatattatggtttatttagttttttttttatgattggatattgacgttatttttattgtttcgtttttataaataatggttatttttattgatgttttttggtgtgtatatataaaggttattttgagaatatttaaagaaggggaatttttatgttagataggatgtatatttgttagtttaatagatataggttagtgaaaatttattagtaaataaatataatttttaatttagtcgcgttaatattaaaggtaagttttaggtgttgtgggttttttttttaattgttaagttgtttttaaaattttataatgaatgtatgttttttgtaaaaaatagatgtttatattttttaagcgtaatttttattttttttagtttattttttttttttagttgtgaatagtggatatatatttgttatgtatttgtaaatatataaattaatacgaatttttttatataaatgagatatagatagatagatataaaatttgattttttattttattgatatattttggatatttttttatgttagtagatttatatttggatttttatttttaatggttatatagaattttattataagaaggattataataaatttatttagttttttattgatagatatttttatttttttttattttttgttattataaacgaaattgtagtgaacgtttttgtatatgtatttttgtaagttttgaaaatatattgaattaaagtaaataaaattaattttggaaacgttgatagataggtgttagaagatagaaatttattatattttggggaaaggttggtgattaggaagggattttagagggtttttgggattttaggatggtttaattttggttataagggtgtgttttgtttttgaaatttattagttgtgaattgtgcgtttttttatatgtattttatttttttgtttgtatgttatatgtaaaattttattttaatatggtaagtgaaaaatatatatatataagttttttagaggaaatgtgagagatgattgaaattttataataagttaaatttttttttattttaattttagttttagggggtatatgtgtaggtttgtttttaggtatattttagtcgggtgtaatggtttaaatttgtaattttggtattttgggagattaaggtaggaagattttttgaggttaggagtttaagattagtttgggtaatatggtaaaattttatgtttattaaaaaaaatttttaaaaatagttaggtatggtggtgtgtatttggaggttgaggtgggaggattgtatgagtttaggaggttaaaataatagggagttatgattgtgttattgtattttagtttgggtaatagagtaagattttgttttaaaaaaaaaaaaaaaaaagaggggagggtatattttatgatgttggagttagggtttttgttgattttgttatttagagagtgaatatagtatttaatagggagatttttagtttttgtttttttttttttttttttttttttggagtttttagngnttgtttttatttttatgtttatgtgtatttaagatttagtttttattttgtagtgagaatatgaggtatttggttttttatttttgtattaattatttatgataatagtttttagttgtagttatgttgttgtaaaggatatgatatttttcgggttagaagtgagtggggagtatttttaggtgatttagaagacggagattttagattatcgttttttttttattagaggttatttcggggatttttttcggaggaaaaaaaatgttattttttgttcgggggcgtttttttttagttggcgtcggcgttagttcgggtttttacggtttcgttttaggtaattgggttcgttggtttgcgaaggttacgtcggggaggggtgttttttttttttttttggagttatcggtcgggttatttttattgggttaagtatagttttgagcggtcgcgtgttcgaggtttaggtgttttttagagttttgtagtttttgtttttttttgtttttttcggtttttgttgtttcgtcgttgtcgttcgatttattttaatttttagtttatttagatagcgttcgagttaggggagggaacggtttgggtaggtaattgcgttcggattgattacgtttagcggtgaaggagcgtggcggggttagggtttcggggagaggttatttagagggtgtgcggttcgggtttttggggagggggtagttggtggttagttattgttagggaggtttagagtatcgagggatttcggagtgttcgtaagaggggttgtaggggtcgggttttggggtgagggttttttagtggtggggcgcgttggtagtaggggtcgttaggagcgcgtagggagggggttcgtcggttgaggggggtcggttcgcgggttagtttcggagtttagcggttcgggaattgcggacgtagttaatgggaggcggaggttgggaggcgcgcggcgttgattggttggtttgggttttttaggcgtgcgcggttttcgttttatgtttgtgtaggagtcggtagttggcgttagggcggtcggaggatgtcgaggggtcggagtcgggagggttcgaggtcgaggcgtattttatttttagtttttattttgtaagtttcgttagttttcggacgtgttgtttttgggttcgtcgttttcggggttttcgtcggaatttttttatttttagaggtcgagttttttttttttttacggttgcgtgtgtaagtttggggtttgagagtcggttgggggtttggggcgtttttagttttgaggggattttggggggatttagggcggggggttaggttgcgggcgattgttttggtgtgttttgttgagaggttttgattgtgtcgtttagtattgcgtttagggggttgcgtgtgtatgttttcggggttgagattagtatgtgtatttggcgttaagtgtgggtgtgtgcgtgtcgttgggattaagtgttatattgggtgttcgggcgtttgtttttaatttttgagtttgtgtttatgtgtttgtttatcgggcgggggggtttagtgtgagtgtttgattgaagtgttgttttgtgcgtttgttggggttnttggtgtcgggattcgtgtttttgtcgtgattttagtgttcgaaagatgttttggagtcgcgggtcggttttcgagtggttttttagggnggtttanttntttatntatgggcgtttttaaataaaaaaattcgtttttgttttatattttgaagatttagtttttttttttttgggtgattatagttagggatgggataataagagttaagggtaaattagttcggggttggtattggtgattttatttgttttgttattttttgtatttggagttttaaaggtatagtttggtatacggtaggattttaataaatagtggatgaatagattggggtttttaatttattttagtatttatagaagttgtttagagtttataaaataatttttgtatttgtgagggtttttaggtgttaggtttataaagggaggtatgttatggtcgtggtattttgtttggttaggattcgagaggagttttttaattggaggatttagtttaagttgttttattttttgtttagtggagtttggttttttttttagtttttattaatatttagaattttttatgatgagtttttattttattagggtagagagtgggtatgtttttattagggagagaaaggatagagatagatagataggaagagagaaatagttatgtagttagggttggggttttgtttgttattgttttttatgtattttaattgtggtaaaatttgtgtaaagtatatggatgttattaattattggtaaaggaataggaagtatatttttgtggttcggtaaatgcgtggggatggttttatttatattttgtaggaagaaattaaattaattgataggtttaaatgtgagtggataggtggggtagtaggagttttgtacgttattggtgggagtgttttttggaaagtgtattttgtaagagaatttggtaatattaataaggacgtgtgtataggtgagtttagtagttttttgtataggtaaaattttagtagtatttattgatataaatataattatagtaataacgtttgggagttatttaggtttatttataggagaaaggataaatgaattatgttatgtttatataatggaatattcgatagtaatgaagacgaataatagtgttacgtattaacgtagatgtattttttaataatattgtgagagaaaaaggtaagttattaaataatacgtatgtatgaggttatttaaatagtttttttggattttatttttggggatgttaaggatttattagagtttttaagttatgtttatatgttatttttttgattaaagggatatgattaataaatgtaatgtggggtttttttttggattttagagtaggatagaaatagttataaaggatatttttgggataattgacgtttagatatggattgtggggttcgattatagtattatattaatgtaaattgttttagttttgataagtatatgtgtttatgtaagagaatgtttttgtttttagggaataaatattgaaatatataatagtagagaggtattatgtttttattatatttttagatggtttaggagaaatatgcgtgtgttttcgtatatattaatatagagagaatggtatagttagggggttaagttgtaagtaattgggtgaatttaggtaaagggtatatgggaaatgttattatanttaaaagttatgattatgggggagaaaatttagtttttttataaaatagttttntagtttttttttttagtataatttgtttttatacgtggggtattcggtatttatgttttggtttttgtttttttgggttttagttttatttagtatnttatatttaaaggttatgtttttatagatgtgtatttttaagattaaatatatatttgaggtatttatgtgattatatatatttatggaaaaagaaaatttttgggtttataaaattgaacgttttagggtggattgttttaggtggttttaatcggggtgttgataatatttagacgagtacgtaggtttttttttttgttacggcggtgttattttttaacggattttgtcgtcgtggttgtaagatggtggtagtagttttaatttttgtatttttttgtggttaagtttagtgggaagaatgtgaggtttttttttagaagtttttgtagatttttattagttttagttgggttatgtgtttgttatttttgatttggtttttggggttaggaaggtattatggttagattggttaggtttgagttttaagttttaagtttaatttttttataaagtatagttggttggggtagagcggtgtttttagtggaaaattaagatgtagttttagaaggatggaaatggatgttgggtggcgaaacggtagaaatttatttcggtttacgtttttgtttgtttaaaatttatgtatatgtttttttttatgttttttttgggggaggtgtgttaggtagtatagatgtatgtatagttttttatagatgttatttttatttttggaaattgttaatgtttatgaatttgttattttacgtagtaaaagagattttgtagatgtaattaaggttgttcgttagttgattttaaaatagggagagtgttttggattatttatatgggtttagtgggttatataagtttttaaaagtagagaattttttatggttggtggtagaggagaaaggatattggaaagagatagtatgggggaaagggagatttaaagtttgggaaggaaggatggaaagcgcgattgttgttttgaaaataaaggaagttttaggttacgtagtaaagaaatggagattttaggtttgtaagtataagcgattgaattttatttataattttaatgagtattttcgggaaagaagttagtttatnaantngggggaagttacgantagttncgnnnaagaggttattgaaagttatagttgttttatatggtttttaacgtttgttattgtgtagtttttttaattttagttattttttgtgagtatatagtgtttttaatttgtagttttttaaagataagtgatgttgagtattttgttatgtttttattgggtatttatatatttttttttatgaagtggttgtttaaattatttgtttattaaagaaaaaattagatagtatgttttattattgaattgtaggagatttgtttttagaaaaattaaattttggatataagtttttattagatatttattttttttaagtattttttttaagtttgaggtttgatttgagttttaatattaagaaattagaaaaagagaataaaataagttgaaaaaagaagtaaaatgaatagaaatttatgaaatagataatagagaaattatagataaaattagtgaatttaaaatttggtttttttaaatgaataataaaattgataagtttataatttgattgtttaagaaaaaagatataaattattaatattaagaatgaaagaagagatattattagagattttataggtatttaaaggattataagaaaatgtgaataaatttgtgttaataaatttggttatttagataaaatggataattgttttgaaagatatgaattgttaaaattggtttagaagaaatagaatttttgaatagttttttattaattaaagaaattgattttgttatttaaaatttttttataagaaaatattaaggaaaaaataatataaattttggttaggtgcggtggtttaggtttataattttagtattttgggaggttgaggtgggtggattatttgaggttagaagttcgagattagtttggttaatatggtgaaattttatttatattaaaaatataaaaaaaaaaaaaaatnttaggtgggtncggtagtgggcgtttgtaattttagttnttagggagggtgaggtaggagaattattttgaggtagaggttgtagtgagtcgagatcgcgttattgtattttagtttgggtaacgagagtaaaattttatttaaataaataaataaataaataaatgtttttttaaaatttttaggttatttgtggtttcgttaggtgaagttggtggttaatagtaaagataggttttatgagatttgtttttatttttgtagttttttgttagtgtttgtggtaaggttttaatttttttttggtttagttttttttttttttttttttgagatagagttttattttattatttaggttggagtgtagtggtgtaattttagtttattgtaatttttgttatttgggttttagcgattcgtttgttttagttttttcgagtagttgggattataggagtgtgttattacgtttggttaatttttgtagtattagtagagatggggttttattatgttgtttaggttggttttgaatttttgattttatgatttatttgtttcggttttttaaagtgttgggattataggtatgagttattgtgttcggttaagttatgaaatgtttaagtgaaggttttttttggaacgtgatttttttacgttgggttttaggaatggtttaaagttggattgtagatttaaaaggttttgattttttaggatgtgtggtataggtgagtataatgaaatttgatatttttatttgatcgttggtttttttaggatttgattgttttaagtgttaggaatagtagtatgttttatttggtgtttttttgagggttgggttgtaggagtagtttaagagggatttttagtgattgtatggagcggtgtcgtttgcgtattttaggttaggttggttttagtatttgtttgttttgttaaaggatggtttttgcggtttgggtttatagggatttgttagtaatgttagttttgttttcggaataacgtgatttagggggttttttttttttaacggggttttttttatcgaggtaagtttatcgtcgataggttttaagtttgttagcgtcggtaggtttttttttttttataattagttttttttttaggggggtttaatttttttttttttgattttttttattaggggaaagaattttttatgtttggttttggtttatatttattttttgttaaagagatttatttttttttttttcgaggttttaataattatttttgtgggatcgggttagttttgaaattgtggtatttttttatttttaacgtttgtggggggatgttttggttcgagatttgtttttttttttttgaacggaaggggagtttaaacgaaagtatgttcgcggtcgttaaatcgagggagtgtttttttacggagagggttttcgcggggatattttatattcgacgtatttttaatttttttataattttcgtttatgaaaaagcggtattgtgcgtttgtgatcgtattttttatttattttagcgttatggttaaatgttgcgggacgttgaaaattaatgaaaagataagtcgcggaatgggagaaaatatttgtaagttatatttttgatgaaggtttagtgtttagaatatataaagaattttttaaatttaataataaaaagataaataatttaattttttaaatggataaaagatttgaatgggtatttttttaaagaagatagataagtggtaataaatatatgaaataatgtttagtattagtaaaatgatgtgtattagaaaatgtatattaaagttatagtgagatattattttatattcgttagggtggttgtaataaagatggacgatagtaatggtgaggatgttgaagtattggaatttttttgcgttgtttttggggaatgtaagatggtgtagttattttggaaataagtaggtagttttttgaaaagttaaatatgaagttattatatgatttattttttgtttttaggtatatatttaagagaattgaaaataaatgtttaaataaaaatttatattatgtttaaagtagtattatttttaatagttaaaggatataaataatttaaatgtttattaattgatgaatggatgggtaaagtatggaatgttgatgttatgtaattttatttagttataaaaatagtgaaaaagtgatatgtaaattatatttttttggagtataaatattttaattgtttaaaatgatattttttttaagagttatttttagtttaaagtttattttttgaagtgttatattcgttaattttttaagagatataaaattatgagaagatattattagaagttatgtaaatattttagttaaaggtaaaaggaaagttaagggtgtttttataaggaaatttaaagaagataattagaaggaaataagtttaatatggttatattaatttgggtaaaagaattagagtggaaatttaagttgtcgagaaagcgggagaaggaaagaaaatttggtttaaatagatcgtataaggaaattttatataaattttggttttggtattatttggtaatttttatttttggttataggtgattttaatattggttttattgttgtaaaataagtttaaatattattagttaaaaagaaattttttattgatttgttgggtaggtggtatttatgtttttttttattaagagattagttttggtaagagggttttagtgtattttgatggtgtttttggtaggatgtttagtgatgttttgttgtttgagatataaggtgggaggagagtgtatttcgtttattatttaatcgatattttggttttgaagaagtaatataggtagaaaatttgttaggtggttagtttaatgaagtagaatattaaagagatattgaagtatagggtttaagtgtttgttgatttattagtattatatattttttttttttttacgtagtaaaattattaataatagattttgataggttttttaggtattgtagttttatttataacggtttaagttttttcgtttttgtaaattttttgtaattttttttttgtttttattttatgttttatgtttaggattacgaattgattaggtatttattttgtttttttgtttttaaattatattttatatatgttataattttttaggataaaggtaaattattttttggtgtattttttttggagtagagaatgtggttagtagaatttgtgattttgaggtggttgtgtaggttgttagtatttttagatttgttggagatttcgtacgtatttattattagtaggtttttgtggatttttttatggaggaatttttaggagttaatgggtaggtggaaggagatggtgaggattaggttggggttgagtntaaataaaaatagttatgttaatattgtttttgnaaaaaaaaacggagttaagagtgaagtattgatgtatgttatgttttagataaatattaaattatgttacgtgaaagaagttcgatttagaaggttgtttgtntttttgtttttatatgaggtgttttgttaaggtttttttatagagatagaatgtagatgagagttttttagaggttgggggatagggtgagtgaggagtgattgttaaggagtatagagattttttatggggtgataaaaatattttgaaattagaatagtggtattagataggagtgatggttgtaaaatttggatatatttaagatgattgaattatagaagtttttaaggtgaatttatggtaagtgaattatattttaataaaaaatattaataagtaataagatattttaaattttagttatgtatatggttatttagttagtgattacgttttttagtttttttgtaattagcgtggttatgtgattaagtttgggttaataagattttaggagaagtgatgagttttaataagttgttttttttggagtttttatttttttttttttgggttggagggtaaatatggaggtgattattgcgttattaggggttagatagatatttttgtggagaagagttgttttgttagttttgggttgttttttagtagattgttttttgaggagggaataagttaaagttatgaagagatttattntttttttttgttttttgttttgacgtgtttttttttgaggtaatgagtatagaaatgatttgatgatttgaataggggaggaggtaaaagagggtttgaaggaagtttttggttataaattgataatttaaaatattttttttagagtatttttatggtttttagatgagtttagatattaatggtttttttaagggttggatttgttagatttggataggttaggagggattttaaagtatttttttatagtgattttgtttaatttaatattttattttttgtgttatttgttgatttgtttttattgattaatttttttttttatatttttttgtttttttgtatgtttgatgatttttgattgaatagtagatttataagtgttttgattttgggtgttggatttttgtttgtttgtgttttgttttgggatagagtttgatttttttgtgatttgtttttaagtattgatttagaatagtttttaatttaggattaatttggttttattgttgagttttattttggttagtgggaatatgaatattttttggttttgtgttaattttagggattgttttgtttgttattttttcgtggttttttatttagttttataagtttttttatatatatgtaatgattagtattttattgattaattaaggagagttttgtgtagaattttagtattatttattttttttttttagttttttttttggtattttgttttgttaattttgtttattttgttttttgaatattgtttttgtaaattagggagattataagaatttgtttaagttttttttttagtattggagtttgaaattttttttagagatgagatagtatagcgatggggtttattttatttgtttttatttttttagagattattattttgtattgttggtaaaatttgaaaattattgttttgtatattttgttttgtttagttgtttaagatgggagggtaagtttattttttgttatattattatgattagaagtagaagttatataatttgatttgtttaaatattaataaaaaaggttttttangttaggtgattagagttttgaattgaattgttataatagggagttatagttttttatttagtttttagattaaagttagtttatagattaggtattttttgaataaagaggaggttggaatttttgaggaattattttgtgatattgtttttaagttaggtttaagagatttaggtatggtattttttttagaagtgttgagaaaagttattttttttttgttgggattgtttagttaggaagaggtttggatggagatgttgtggttattgtggggtgggttaagatatatggaggaaataagaataaagaaatggatatagtttggtttttgaagttattttttgagtttttatattagttttgtgggttatggttgtttagttttatgagttaatgtattatttgttttgtttaagtcgttttgaggtgggtttttgtgttgggttgagatttgaggaatttgtgttagggtatgaaaggagttttttgagagaggaagtatttttagggtttggattatatgaaatagtttaggaaaaatttaggtaatgtgagtttgtagattttaattgggaatgttaattagggatattaaggagtttatttagttttaagaagatgaggggggtaaattagatattttaattttagagtttaatttttgttaggatattatttgtagtttttttgggatttttatgtttttttttttgtttttataagtatatgtgatatttgatttgtgataggtttggggttagtgttttagtggggaggtatatttagttttttttgtattgttataaagaaatatttgagattgggtaatttataaagaaaagaggtttaattggtttatggttttgtaggttgtataagtatggtgttggtatttgtttggtttttggggaggttttaagaagtttatagttatggtggacggtgaagtaggattaggtattttatatagtaaaagtaggagtaaaagagagagagagtgggagggggtaggtggtatatacgataaataattagattttaaagaatttattatagtgaggatagtattaagtttgtgggtttattattnngnggganattnatcgantagtnnttnntaatatgttatatttttgtttttttatttttattttattttttttttttgtattaaatattttttaatttagtttttaaatttatgtaatgttatttttaatatatttttttgaggtatttttttagtggttgatttagggtttattattaattttagatttttattaatttaattttaatgagatgttatttttaatagttttatttattttttttttttttttatagtattattgttatttttatatattatatttatgaatgttataaatttaatattatagtgttataattattattttatataattttaggttttaaagaagttgtgaggagaaaagagagtaattatgtatttatagtttttattatattagttatgttatttattattttttgtttttttaaaaaaataattgaagttttgttttggtattttttttggattatgttttttttattttttttttagattaattttaatttgtattttttttttgtgataaattgtaattgtgaatttaatagtttttagtgagttttgtgagtttttttagtgaattgttaaaatttggggattttttaaatttgtaattaatattaaaagtaagggtagttttatgtggattgtgttttttttgatttcgtatttggtttaaattgtataaataatttttaaggttagtgtttgaaatttgttttaatttttaagacggttttttttagttgttttttttttatttttatttagtaaagtagttagtttgtagtttagtttgtttttttattgaatttagtaatattttttttatggttttttattataatttttattgatttttagagcgtttttaggtttgaatttttttaaattttgttgtatataaagttagtttttttggggagagatttggagttttttattttatggtttgtttttttttttgggtaaaatttttgagtttcggttttggtaatttggggtaggaattaatggtatgttttttttttaggggtattttagttttaggagttgagtattagtggaaagggggaggaattatttttaggttttttaagtttatttttttagggggattttttttttataggacggggttaaatcgtcggggttttagatttcggggggtttttgtttttgtttagtttttgtgttaaaatgggggggattcgattaaaagaaatttttttttttaaaagtttttgttcggaatttaatttcgataaaaaaaattcgtgggttaaaaaaaaaaaaattcgaatttttttttttttcgaggaaattttttttaaaaaacgtttcgtacggaagtgaaaaataattttttattttataattttttttacgacgttggtggggggggggtttttttggggattttaaagggttttttttttggggtgttcgggggcgttttttttttttattttttttgagttcggggttttatggggtttggtttattcgggtcggggggggttttaagtttgagtggtttgatttaaagttttggttttggtgcgtttggttggggtttattggtgtcgggaattcgtttttcgggcgtgatttttatgtgtacgggtgtgtgattttggagtcgcgggttattacgtgagtgtgcgtggttgaattttttttntcgtttttttttcgttttgagttttgggttttttttttattcgggattggtgttttttttcgtcggatttgggttggggtttcgtggcgtgcgggatatttcgtggtgggattttggggggtgttaggcgttggcggtacgttttattttttttttttcgcgtagg

SEQ ID NO: 56 - DNA, 17421 bp, Artificial Sequence
  chemically treated genomic DNA (Homo sapiens)
  unsure (167, 1832..1833, 1836..1837, 1842, 1848, 1852, 1857,1859..1860)
  unsure (2953, 4024, 4630, 4733, 4767, 8161, 8189, 8200, 9142..9143)
  unsure (9147, 9153, 9168, 9170, 9173, 10243, 10340, 10394, 11996)
  unsure (12002, 12005, 12012, 12102, 13715, 13717, 16077, 16097, 16907)
tttgcgcgaggaagggggagtgaggcgtgtcgttagcgtttgatattttttaaagttttattacgaggtgtttcgtacgttacggagttttagtttagattcggcgagaaagagtattagtttcgggtgggaggaaagtttaaggtttaaaacgaaaggaaggcggnggagggggtttagttacgtatatttacgtggtgattcgcggttttagaattatatattcgtgtatatgggggttacgttcggggaacgggttttcgatattagtggattttaattaaacgtattagagttagaattttaagttagattatttaaatttgaggtttttttcggttcgggtagattaaattttatggaatttcggatttaaaaaaggtgggaagaaagggcgttttcgggtattttaaggggggggttttttgggatttttagggggattttttttttattagcgtcgtggggaaaattatagggtgggaggttgttttttattttcgtacgggacgttttttgaggggggttttttcgggggggggggagattcgaatttttttttttttggtttacgaattttttttgtcggagttaaatttcggataagggtttttaggagggggggttttttttggtcgagttttttttattttggtatagaggttaggtaggggtaaaaatttttcgaaatttggggtttcgacggtttaatttcgttttgtggaaaaaggatttttttgggaaggtaaatttaggggatttgggggtggtttttttttttttttattggtgtttagtttttaaaattggggtgtttttgaaaggagagtatgttattggtttttgttttaaattattagaatcggggtttaaagattttgtttagagagagaagtaagttataaaatagaaaattttaaatttttttttaaaggaattgattttatatgtaatagagtttggagaaatttaagtttaagagcgttttgaaaattagtggaggttgtggtgaaaggttatgagggggatgttgttagatttagtggagaaataggttaaattgtaagttggttattttgttgaatagaaatggggaagagatagttgggaggggtcgttttgggagttagaataagttttaaatattaattttgggaattatttgtgtagtttaggttaagtgcgaagttagaggggatatagtttatatgagattgtttttatttttaatattaattgtaagtttggggggtttttaagttttgatagtttattggaaagatttatagaatttattaaaagttgttaaatttatagttatagtttattatagggaaaggatatagattgagattagtttgagaaagaggtaaagagggtatagtttaggaaaagtattaaagtagaattttaattgtttttttaagagaataaggaatgataaataatatggttaatataataaaaattataaatatatagttgtttttttttttttttatagtttttttgagatttgaagttatgtaaagtaataattataatattgtaatgttgggtttatagtatttataaatgtaatatataaaaataataataatattgtaaaaaagggggaaaagtgaatagagttattaggagtaatattttattggagttaagttagtaaaaatttgaagttgatggtaagttttagattaattattaaggaaatattttaaaagaatatattgaaaataatattatataaatttaaaggttaaattagaaaatatttaatgtaaagggaaggagtaaagtaggaatagaaaaataaggatataatatattgnnggnngttgntcggtnaatnttttntnnggtggtgggtttataggtttggtgttgtttttattgtagtaagttttttaagatttaattgtttatcgtgtgtgttatttatttttttttatttttttttttttttgtttttgtttttgttatatgaggtatttgattttgttttatcgtttattatgattgtaagttttttgaggtttttttagaagttaagtagatgttagtattatgtttgtatagtttgtagaattatgaattaattaaattttttttttttataaattatttagttttaggtatttttttataataatgtaagaaaagttgaatatatttttttattggagtattagttttagatttgttataagttagatgttatatatgtttatagagataagaaagaggatatggaagttttagaggggttgtaggtagtattttggtaagggttgagttttggaattgggatgtttggtttgttttttttatttttttggggttaggtgagttttttggtatttttagttggtatttttaattggaatttgtagatttatattgtttggattttttttgggttattttatgtgatttagattttgggagtgtttttttttttaagaagttttttttatgttttgatataaattttttaggttttaatttaatatagaaatttattttaaagcgatttaagtaaaataggtaatatattggtttatgagattgaataattatgatttataaggttggtgtgggggtttaaaaggtggttttaggaattaggttgtgtttatttttttgtttttgttttttttatatgttttgatttattttataatggttatagtatttttatttaaatttttttttagttgagtaattttagtagagaaagagtaattttttttagtatttttaaaaggaatattatgtttgagttttttgggtttggtttgggggtaatgttataaggtaattttttagggattttagttttttttttatttaagggatatttggtttgtgaattggttttggtttgggaattggataagggattgtgattttttattatggtaatttaatttagggttttagttatttgatntaaagaattttttttgttggtgtttaggtagattaaattatatgatttttgtttttggttatgatggtataatagggagtagatttatttttttattttaaataattaaataaaataaaatatgtaaaataatggtttttagattttattaatagtgtaggatgatgatttttgagggaatgaaaataaatgaggtgagttttatcgttgtgttgttttatttttgaagggagttttaggttttagtgttgggagggaggtttaaatagatttttgtggtttttttgatttatagagatagtgtttagaagataaggtagatagaattaataaggtagagtattagaaagagagttgaagagagggggtaggtggtattgaaattttgtatagggttttttttggttagttagtggaatattgattattgtatgtatgtgaagaaatttgtgaggttaggtaaagaattacggaaaagtagtagatagaataatttttagggttgatatagggttaggaagtgtttatgtttttattggttagaatggaatttaataatggggttaaattagttttagattaaaggttattttgggttaatgtttaaaagtaagttataaaagaattaaattttattttagaataaagtataaatagataaaaatttagtatttaggattaaaatatttataaatttgttatttaattaaaaattattagatatgtaaagaaataggaaaatataaggagaaaaattaattaatagaaatagattaataaatgatataaaaaatagaatattagattaggtagaattattataaaaaaatgttttgaagttttttttggtttatttagatttgatagatttagtttttggaggggttattagtatttgagtttatttaagagttatgaaagtattttgaggaagatgttttaaattattaatttgtgattaaagattttttttaagtttttttttatttttttttttatttaggttattaggttatttttgtatttattgttttagggagggatacgttaaagtaggaagtagagggaaanaatgagtttttttatggttttggtttattttttttttaagaagtagtttgttgaggagtagtttagggttggtagggtagtttttttttataagagtatttgtttagtttttggtggcgtaatgattatttttatgtttgttttttagtttaggggaaggagaatgaggattttagaggaaatagtttattggggtttattattttttttggaattttattagtttaagtttaattatatgattacgttgattataaagaggttgggaaacgtggttattagttgggtggttatgtatataattaaaatttggagtgttttattatttgttaatattttttgttgaggtataatttatttattataaatttattttaaaaatttttgtgatttaattattttgaatatatttagattttgtaattattatttttatttaatattattgttttaattttagaatatttttattattttataaagaatttttgtgttttttagtagttattttttatttattttattttttaatttttggaaagtttttatttatattttgtttttatgggaaggttttggtaggatattttatgtaaaggtaaaganataggtagttttttgggtcggattttttttacgtaatatgatttaatgtttatttagggtatagtatatattagtgttttatttttgatttcgtttttttttntagaaataatgttggtatggttgtttttgtttangtttagttttagtttggtttttattatttttttttatttgtttattaatttttgaaagtttttttatgaggagatttataaggatttgttagtgatgggtgcgtacgagatttttaataagtttgggggtgttggtagtttgtatagttattttaaggttatagattttgttggttatattttttattttaaagaggatgtattaaagggtaatttgtttttattttggaagattatgatatgtatgaagtgtgatttgagagtaaggaaatagggtggatatttgattaattcgtaattttagatatgaagtatggagtagaggtagaaaagaaattataaggagtttataaaagcgagaaagtttaaatcgttatagatggagttgtaatgtttagaagatttgttagaatttattgttaatgattttgttacgtgaagaagagagagatgtgtagtattaatgaattaataaatatttgagttttgtattttagtgtttttttaatgttttgttttattggattagttatttggtaggttttttatttgtgttgtttttttaaggttaagatgtcgattgagtaatgaacgaagtgtattttttttttattttgtattttaggtagtagaatattattgggtattttattaaaagtattattaaaatgtattggagtttttttgttagaattgattttttggtgggggaggatatgggtattatttatttaataagttaatgagagatttttttttagttggtagtatttggatttgttttgtaataataggattagtattagagttatttatgattaaaaataagggttattaaataatgttaaagttaggatttgtataaggtttttttgtgcgatttgtttgaattaagttttttttttttttttcgttttttcggtagtttgaatttttattttagtttttttatttagattggtatggttatgttgaatttgtttttttttggttgttttttttgggtttttttgtgaaaatatttttaattttttttttgtttttagttgaaatgtttatatagtttttggtgatatttttttataattttatgttttttaaaaggttgacggatgtgatattttaaaaagtgagttttgaattgaagataatttttaaagaaaatattattttagataattaaaatatttatgttttaaaaagatataatttatatattatttttttattgtttttatggttaaataaaattatatggtattaatattttatattttgtttatttatttattagttggtggatatttggattgtttatattttttagttattaggaataatgttgttttgaatataatgtaagtttttgtttgaatatttgtttttagtttttttggatatatatttaggagtagaagatgggttatatggtagttttatgtttaattttttaagaaattgtttgtttgtttttaaaatggttgtattattttatattttttagaagtaacgtaagagggttttaatgttttaatatttttattattgttatcgtttatttttattatagttattttagcggatgtaaagtggtgttttattgtagttttgatgtgtattttttgatgtatattattttattgatgttgagtattattttatgtgtttgttgttatttgtttattttttttggagaaatgtttatttaagttttttgtttatttaaaaaattggattatttgtttttttattgttgagtttaaggagttttttatatattttagatattagatttttattagagatatgatttgtaaatatttttttttatttcgcggtttgtttttttattgatttttaacgtttcgtaatatttaattataacgttagagtgagtgaagaatgcggttataagcgtataatatcgtttttttataagcggggattgtaaagaggttgggaatacgtcgggtataaaatattttcgcgagaatttttttcgtgggaaaatattttttcgatttgacggtcgcgggtatattttcgtttaagtttttttttcgtttagggaggagaggataggtttcgagttagaatatttttttatagacgttgggggtgaaggggtattatagttttaaggttaattcggttttatagaaataattgttggggtttcgggagggaaaaaagtaggtttttttaataaaaggtagatgtgggttaaaattagatatgggagatttttttttttggtgaaaaaagttaaaagggaaaaggttgggtttttttgaagaaaaagttagttgtgagagagggggggtttatcggcgttagtaagtttaaggtttgtcggcgataggtttatttcggtaaaggaagtttcgttaagaagaaaagattttttgaattacgttgtttcggaagtaaggttgatattgttggtaagtttttgtgggtttaagtcgtaaggattattttttggtaggataggtagatgttagagttagtttggtttagggtgcgtaggcgatatcgttttatgtagttattaggggttttttttaagttgtttttatagtttagtttttaaaggaatattaagtgggatatgttgttgtttttggtatttaggatagttaggttttaagagggttagcggttaaatgggaatgttaggttttattatgtttatttatgttatatattttggaaaattaagattttttgaatttataatttaattttaagttatttttagggtttaacgtggggaagttacgttttagagagaatttttatttaaatattttatgatttggtcgggtatagtggtttatgtttgtaattttagtattttgggaggtcgaggtaggtggattatgaggttaggagtttaagattagtttgaataatatggtgaaattttatttttattaatattataaaaattagttaggcgtggtggtatatttttgtaattttagttattcggggaggttgaggtaggcgaatcgttagaatttaggtgatagaggttgtagtgagttgagattgtattattgtattttagtttgggtgatagagtgagattttgttttaaaaaaaaaaaaaaaggaaattgagttaaaaagaggttaggattttgttatagatattggtaggggattgtaggagtggggataggttttatgaagtttgtttttgttgttaattattagttttatttggcgggattataggtggtttggaagttttaaaggagtatttatttatttatttatttatttagatggagttttgttttcgttgtttagattggagtgtagtggcgcgatttcggtttattgtaatttttgttttaaaatgatttttttgttttattttttttagnagttgggattataggcgtttattatcgngtttatttaangtttttttttttttttgtatttttagtatagatggggttttattatgttggttaggttggtttcgaatttttgattttagatgatttatttattttagttttttaaagtgttgggattataggtttgagttatcgtatttggttaggatttatattattttttttttaatgtttttttgtggaaaggttttaaatgataaaattaatttttttaattgatagagaattatttaaaagttttattttttttggattagttttggtaatttatgttttttaaggtaattgtttattttatttaggtagttaaatttattggtataaatttgtttatatttttttataattttttaaatgtttgtaggatttttaatgatgtttttttttttatttttgatattggtaatttgtatttttttttttgagtaattaagttgtaggtttattaattttattgtttatttagaagaattagattttggatttattgattttatttatgatttttttattgtttattttatagatttttgtttattttatttttttttttaatttattttgttttttttttttgattttttaatgttggaatttagattaagttttaaatttggaaaaaatatttgaaaaaaatagatatttggtaagggtttgtatttagaatttagtttttttaaaaataaattttttatagtttaataataggatatgttatttgattttttttttagtggatagatgatttgaatagttattttataaaagaagatgtatgaatgtttagtaagaatatgataagatatttaatattatttgtttttaaggaattgtaaattaaaggtattatatatttataaaaaatggttaaagttaaaaagattgtataataataagcgttgaagattatgtggagtaattgtaatttttaataattttttnnncgnggttgntcgtaattttttttngnttngtgggttaatttttttttcggaggtgtttattagggttgtgagtagaatttagtcgtttatgtttgtaggtttggggtttttatttttttgttacgtggtttgaggttttttttgtttttaaagtagtagtcgcgttttttattttttttttttaagttttaaattttttttttttttatgttgtttttttttaatgtttttttttttttgttattagttatggaaagttttttgtttttaagggtttgtgtgatttattgagtttatgtggatgatttaagatattttttttattttaaggttaattgacgagtagttttaattatatttgtaaagttttttttgttacgtgaggtaataaatttatgggtattgatagtttttaaggatgagggtggtatttgtggggagttgtgtatatatttgtgttgtttagtatattttttttagagggagtatgggaagaagtatgtgtatggattttggataggtaagggcgtgggtcggggtgggtttttgtcgtttcgttatttagtatttatttttatttttttgaaattgtattttgattttttattgggggtatcgttttgttttagttagttgtgttttgtgaagaggttggatttggggtttggggtttaggtttggttagtttgattatggtgtttttttgattttagaggttaggttagggatgatagatatatgatttagttgaagttaatgagaatttgtagaagtttttggaagaagattttatattttttttattggatttggttataaaagggtgtaggggttggagttgttgttattattttgtagttacggcggtagagttcgttggagaatggtatcgtcgtggtagggagagaagtttgcgtgttcgtttggatgttgttagtatttcgattaaggttatttgagatagtttattttggagcgtttagttttgtgagtttaagaattttttttttttataaatatgtatagttatatgaatgttttaagtgtgtgtttagttttgagggtatatatttgtgaaaatatgatttttgggtgtggngtgttaagtgggattaagatttagagagataagagttagagtatgggtgtcgggtgttttacgtgtggggataggttgtgttggaaggagaggttgnagggttgttttatagaagaattgggtttttttttttatggttataatttttaantgtgatggtattttttatatattttttatttagatttatttaattgtttataatttggttttttggttgtattattttttttatattaatatgtacggagatatacgtatattttttttgaattatttgagagtatggtggagatatgatgtttttttattattgtatattttagtgtttgttttttaaaaataaggatatttttttatataaatatatatgtttattagagttaggataatttgtattgatatgatattatgatcgaattttataatttatatttaaacgttaattgttttaagaatgttttttatagttatttttgttttgttttaggatttagaaaaggattttatattgtatttattggttatgtttttttagttaaggaggtgatatgtgaatatggtttggaaattttagtgggtttttgatatttttaggagtgaaatttagaagagttatttgaatggttttatatatacgtgttgtttggtgatttgttttttttttttatagtattgttgggaggtatatttgcgttgatgcgtgatattgttgttcgtttttattgttgtcgagtattttattgtgtgggtatgatatggtttatttatttttttttttgtgaatggatttgggtggtttttaggcgttgttattgtggttgtgtttatattagtggatgttgttgagattttatttgtgtagggaattgttgagtttatttgtatatacgtttttgttagtgttgttaaatttttttataaagtgtattttttaaaaaatatttttattagtggcgtgtagagtttttgttgttttatttgtttatttatatttggatttgttaattaatttaatttttttttgtaggatgtggatgaagttatttttacgtatttgtcgggttataggaatatgttttttatttttttgttagtggttggtagtatttatgtattttgtataggttttgttatagttagagtgtatagagggtaatggtaagtagagttttagttttggttgtatggttgtttttttttttttgtttgtttgtttttgttttttttttttttgatgaggatatgtttattttttgttttggtgggataggagtttattatggaggattttgggtgttgatggaggttgagagagaggttaggttttattggatagggaatgaagtaatttgggttaaattttttaattgggaggtttttttcggattttggttaagtagaatgttacggttataatatgtttttttttgtgggtttagtatttaggagtttttataggtataagagttgttttgtggattttaaatagtttttataggtgttaaggtgagttgagaattttaatttatttatttattgtttattgaggttttatcgtgtgttaggttgtgtttttgaagttttagatgtagaagataataagatagatgaagttattagtgttagtttcgggttagtttgtttttagtttttgttattttatttttggttatggttatttaaagggaggggagttgagtttttaaggtgtgaggtagaggcgggtttttttatttaaaagcgtttatgnatgganaantaagttnttttggggggttattcggagatcgattcgcggttttaaaatatttttcgggtattggggttacgataagggtacgggtttcgatattagngattttaataaacgtatagagtagtattttagttagatatttatattgagttttttcgttcggtagataaatatatgaatatagatttaaaagttggagataggcgttcgggtatttagtgtggtatttgattttagcgatacgtatatatttatatttggcgttagatatatatattgattttaatttcgaaaatatgtatacgtagttttttgagcgtagtattaagcggtataattaggattttttaataaagtatattaaagtagtcgttcgtagtttggtttttcgttttaagtttttttagagtttttttaaagttaggagcgttttaggtttttagtcggtttttaaattttaaatttatatacgtagtcgtggggaggggagggattcggtttttgagagtgaaggagtttcggcgggagtttcgagggcgacgggtttagggatagtacgttcggaggttggcggggtttatagggtaggagttgggggtagagtgcgtttcggtttcgggttttttcggtttcggtttttcggtatttttcggtcgttttggcgttagttgtcgatttttgtatagatatgaagcgggggtcgcgtacgtttaagaagtttaagttagttaattaacgtcgcgcgttttttagttttcgttttttattggttgcgttcgtaattttcgaatcgttggatttcgggattgattcgcgggtcggttttttttagtcggcgggttttttttttgcgcgtttttggcggtttttgttgttaacgcgttttattattaagggatttttattttaaggttcgatttttgtagttttttttgcgaatatttcgggatttttcgatgttttgggtttttttagtagtaattaattattaattgttttttttttaggagttcgggtcgtatattttttggatggttttttttcgagattttaatttcgttacgtttttttatcgttgaacgtggttagttcgagcgtagttatttatttagatcgtttttttttttagttcgggcgttgtttgggtggattgggggttgggatgaatcggacgatagcggcggaatagtaggagtcgagaggggtagagaggggtaggaattatagggttttagagggtatttgggtttcggatacgcggtcgtttagggttgtgtttgatttagtggaggtggttcggtcggtggttttagaaagggggagggggtattttttttcggcgtggttttcgtaggttaacgggtttaattgtttggggcgaggtcgtggagattcggattggcgtcggcgttagttggagggagacgttttcgggtaagaggtggtattttttttttttcggggggggttttcgaggtggtttttggtgagggggaggcggtggtttgaggttttcgttttttaagttatttggaagtgttttttatttatttttagttcggagaatattatgttttttgtagtaatatggttgtagttgaaagttattattataaataattaatgtagaaatagaaagttaaatattttatgtttttattatagggtgggggttaaattttgggtatatatggatatgaaaatgagaatagntnttggggattttaaaaggagggagggagggagaagggtaaggattaaaaatttttttattgaatattatgtttattttttgggtgataggattaatagaagttttaattttagtattatgaaatatattttttttttttttttttttttttttttgagataaggttttgttttgttgtttaggttggagtatagtggtatagttatggttttttgttgttttgattttttgggtttatgtagtttttttattttagtttttaggtgtatattattatgtttggttatttttaaaaattttttttggtagatatggggttttattatgttgtttaagttggttttgaatttttggttttaagggatttttttgttttggttttttaaagtgttaggattataggtttgagttattgtattcggttgaaatatatttagaaataaatttgtatatgtattttttgaaattaaaattaaaataaaaaagaatttaatttgttatagagttttagttattttttatattttttttgaaaaatttatatatatatattttttatttattatgttaaagtaaaattttatatgtaatatataaatagaaaagtaaaatatatatagaaaaacgtatagtttataattggtgaattttagaaatagaatatatttttgtaattagaattagattattttaggattttagagattttttgggatttttttttagttattagtttttttttaaagtgtagtgaatttttgttttttaatatttgtttgttaacgtttttaggattagttttgtttgttttagtttaatgtatttttaaagtttataaagatgtatgtgtaagaacgtttattgtaatttcgtttatgatagtaaaagatggaaaagaatgaaaatgtttattaataagagattgagtaaatttattatagttttttttataataaaattttatgtaattattaaaagtaaagatttagatatgaatttattaatatggaaagatgtttaagatatgttagtaaagtagaaaattaagttttatatttgtttatttatattttatttatgtaaaaaaattcgtattgatttgtgtgtttgtaaatgtatagtaaatatgtgtttattgtttataattgggagaagggaatgggttaggaagggtggaaattgcgtttaaaaaatatgggtatttattttttataaggagtatgtatttattgtggaattttaaaggtaatttaataattaagaaaaaaatttataatatttgaaatttgtttttggtgttaacgcggttgaattgaaaattgtatttatttattaatgaatttttattggtttgtatttattaaattgataaatgtgtattttgtttgatatagagattttttttttttgggtatttttaaagtagtttttgtgtatatatattagaaggtattagtgaagatagttattgtttgtaagagcgaaataataggaataacgttagtgtttaattatagaggaagagttaagtaaattatgatgtagttatttattaaataatgtagtagttaaggagaatgagtggttttatttattagtatgaataggtttttaagataaatttttgagtgtaaaaagtaaggtatcgagtattgtgtaaagtattataatttttttttggttatgtatatatatgtatatagggtatatgaaaatatttagaaggatgtattttaatttgatgtttattttattagtttaggaggtggtgagtttaatgtgtaaggttttagtttgagggttgaaggtagttaggtgtgagtttgaaataatatgaatttttttttttttgagtatggattttttgttcgttatggtatgtaatttttagaggtttagagaagggaagggatttgtgtcgggttatatagagggtaggtggtcgagttgggattagttttaggtgggtttggttttaaagttcgtgtttagtttatttttttttggggtaggtgacgtggaggtttaggggagttggagggatttagtggggagggggaggggttttttttttatcgggttttttgtttgggtttagaatttttttttttattttgttgagtaatttgatggggtgaagagtatttttaggtttagggtatagatatgttggggggtttttttttaggtttttttttttcgcgtttgttttagatttgttttattttttgatttgtggaagtttttgtgggtttggtgtatggtagtttttttgcggtgttttttttttcgcgtttcgcggcggtttagtatttgatgatcgttaaaaaaataaaaaaaatgggggtgagggaaaaaaanatcgtattgttgcgggaggnttggaaaaatttttaattttttttttttgtttttttaataggttttatgaatgtttttggttatattttttttttgtttatgtgtgagggttttttatatgtttggaaaaggaatggttgggtcgtgtggtattttaatttttagatttgttagaaataggtaaattattttgtaaaatagtttttttttttatatttttggtaatagggtaagggaatttttgtttttttatgttttagttagcggttggaatttttttttagtttttttttttggtaaatttttttttatttttattttgtagttaaaaagtttttattgtgtattttaatttcgtttttttatataggatatatatatgtgtgtgtatgtatgtgattgtgtatatatttttttatttatttatttatttatttatttatttatttatttatttatttattatttatttgtttatgtaattttaataggaattaaagggtatattatgaaaattttttttttatttttgtttttagttatttaaaattaggttttaaatttaggtagaatgttaattattgtttatagttttttttgttttttatttaaagaaattttgttaatatgtaagtaaatgtatatattttttttttttattttagtttttaattaagtggtaatatattattgttatttttgtattgtatttttatttttatttaaattttattttgggataatgtcgtattagtatgtaaaaaattatttttttttttaatatattttttttttttttttttttttggttttttttttttttttttttntgatagtggtataattttttatttgtagataaatattttttgtttttaaatttttgttataatttatgaggttgtggtgaatttttttatatattttttagatgtaaagtatatatattagatgaagttttatgagtggaatttttagtttaaagcgtaaatgtatttgtatgtttgatagcgttttgttgtttattttaatttaagaatgtattagtggacgtttgttttaggtcgttttttttatgtttttaggaatataatgtattatttagtgttttgatatttgttaatattaataggtataaaatggtattttaaagtgtttttatttttaaaatagttttattgtgatataattgatatattataaagtttatttgttttaaaggtatattttaataagttttagtaaatttatagggttataattatttttttaatcgaattttataatatttttttttattttaagtattttgatatgggttaaatttttattttttttgagtga

SEQ ID NO: 57 - DNA, 7802 bp, Artificial Sequence
  chemically treated genomic DNA (Homo sapiens)
tggaatgggaagggatttttttttttttaggtttagttcgttagggtttcgggtcgtgttgtagtttttggtttttggtgtcgtttttcgttttttagtttcgtagattttcggttttttttttgtttgcgcggtcgggatcgtttaggtaggcgtcggggtttcggggtttcggggggagggattcggcggttcggttcggtttcgttttttttttttgtttgtaaatatttgttgtttcgttggaaattcgacgatttcgcgcgcgttttgtttgtaaagtttttaagtaaatacgtttaaatgatcgtttcgggcggttcgaggtacgtttttttttttttcgcgggattagtaattttaggatttcgatttcggggtttcgttttgtttgttatttaggtcgggtagcgcgcgggcgttcggggtcgtttttttcggtatttcggtttcgcggagttcgtttggaagcgtcggttgtttggttttggtgggtggttcggtcgcgagtattttcgcgttttgggtttgtagttttagggttgagttttagaaagtcgcgttttcgttttgcgttatggtttttgttttttgtattcgattgggtttttttatttttattgggatagggttttttcgtttttgggagggcgggtgggagggatttgtacgtgggtatgtgtttgggggtgtgtgtggtagtttaatttttatcgagtggagaaagttcggttttattttttattttttttttaagaggatatatatatttcgtttaatttgacgtttaaagtagtcgtttttaggtttggggtttcggataggttaagtcggttgttgtcgattcgtacgtcgtttcgggtttcggtttttttttaggcggtggtcgcgtcgtcgtttgttcggttgcgggatgtttgtttttaaggttttaggcgtttaggttgatcgttagttttttattttggtgagggaggttttgcgttttgtagaagtttcgggttttgcggcggcggcggcggtatttttttggtcgttttttcgtttttttttattcgagtttcgtcggttgttttttgggaggaaggggattcgttagattaggtcgaggtttaggtatttgggagggggtcgcgttaggtttgcgggaaggcgtttaggttttttcgtaggaggttaggattagttttgtggcggtggtatagggagaattaggattattttttttttttattttcggttaggatttttttttttttttttcgttcgttaagggaggaggaagttcggtttgtttttgtcggcgaggcgggttaggtcggcgtttggtttggttcggattttcgtagttcggtttttcgttttaggttacgcgtcgtagtttttttagtttcgtttttttttttttttttttttcgtgggtttcgaggtcgatttcggtttttttttttcggtattttttttttatttttttttttttttcgttgttttgtgtttcgggtttcggggttgggttcgtgacgttaaatttagtgtggcgtcggcgagattggtcggcgcgggttattaaaagagtaacgtttttttttttaattatttattgttagttcgggaattggggcgggtcggttgggaattaaatgttaaatattttttatcggttggttttattattcgggatatttagttttaggttttttatttttttttgttagttttaaattatttagattaagaagggttttcgagattttttatttttttaaaggtgggggttgtttttttttattttcggttagttcgatttggtgttcgcgattgaatttaaacgaataatttttatttttttatttaaaattagcggataggcgtttttgtatcggaaggtttttttattagttttttttttttgtttttgaaataatttttagttttagaagttagtatttttaagatttggtattcgtagcgtttttgacgcggggattttttttttcggttttgaggttttcgcgcgtagaatttatggtagtttttggttttacgcgtggttgtgagttgggtttacgttgcgtggcgtatttatttttcgattgacgcgcggagaagtattttttatttttttttttagtttgtatttttaaattttaatttcgggttttttagtaaaaatgcgtgtgtattcgtttttttttgtttatggagaggttttcggtgaatgttagatagtaattaaataattaaaaggtttagagagcgttgtgagtaggagaagatgcgggtagtttggttggtttaggagagacgagtggttagagaatgaaaggaaaatcgatgttttttaattgggtcgtttaataacgggagattaagtgggtttaggagaaacgtggcggggggggggggagttttttttaaaaaattggggttttttttttttgttttatatatggaaatttagttttgattttaaataaatattagatttaagaaggtgaggattttaaagaagatttaaacgcgagattaggaagatttacgtttttattattttttttaatatattttattaatttttttatagggatagtgttttaaaatacgacgatttttatatattaaggtgaagttgaatattgttgttgtttttttatcgtatgaaaggaattttttagaatttatttttagggacggttttttttatttcgaatttttgtatttgtagggaattttatggggtagaggagcgaagagggaataatgtttttaatttaaataaaattttaaattaagtttttagttttatcggtgggatagtttgcgggggaatttatttttttttttggtagtattgttttgggggcgagtagagagtggatttggagtttttttttttcgtttgatttttgttcgttcgagtagtattttcgggttagcggttgtagttattcgggcgtcgttaggggatgtagtggtttaaaggatcgagcgggcggtgtaggttggaattcgcggggcggattaatcgcggttcggttatagtttcgttcgttgattggtttttttaggtttcgttttcgttcgtttcgtttttttcgttggggcgtttcggagtcgcgtgtttttcgtttcggggtgtttattgcgtagagcgtggtttggagattcgcgagtcggggaaggtcgtcgtggagtttcgattagaggtcggggttggggtcggtgtagatcgagggttggtttttttgattgtgggagaaacgtcgggagtcggagtaagtagggtttcgggcggggcgaaaggaaaagttgggtttttagagtgaagatcgagttttttttgttcgtttatattgagcgtattcggggaatgagttagagttagtttttttttttttttttttttttttattttttattgttgttatttaagttaaaagtatatattgattataaatattaggtttggaaagggtagttgtaatagttgaagcgtgtttattttgggggtttgagagcgtagaaggttcgggaaagaggtgataatgataataaaattgacgcggacgttttagttaaaggtattttttttttattcgatgatttatttttttaggaagtcggttcgagaggtaaattttaaaatattttgatatgaaatattttgtttttttgattaatttaacgcgtacgtttttttatatcgatgcgtttttttaaatattttgtattagattttaataatgatttatgcgtgtttattttttaaaagtttgaaaaagaaaattttgtttatcgaaatgaattttatgaatggggtaggttggttgtatcgggacggaatcgtttattcgattcgaatgaattggtaggagtcgcggttatatttaaagggttagagcgcgcgttttttttcgttcgtttttaagtttcgcgggtttcgtttattttgttcgtcgttttttcgtcggcggtcgttttttgcggcgttttttttcggttagtggaggggcgggaggaggggcgggggtgcgcggggcggggggagaagttttggagcgggtttgggttgtagtttttttgtgtcggggattttgttttttattcgttagcgttaggtttttttttttcggcgcggatgatattagaatttttttaagttgcgtcgcgttatagttgtttgcgaatattgagttgtttggcgtcgttttgatatttttagaaagaatgtattttttgtaaaaaaaaaaaaaaaatattgagagagggagagagagagagaagaagagagagagacggagggagagcgagatagagcgagtaacgtaatttgatcgagtaggtcgtacgtcgtcgttttttttttttttttgtttttcgttatttaggttggtattggtgattttttttttttttaagtttgattttttgtttttaattatttgggaggatttaaattaattttaaaaatttaattttttttttttggaggttttttaggggttgagaggacggtttcgggatcggtgttttcgagggagggatttgttttttaagtcgtaatagttagttttgggatttgttttttaagttgtttagttagtttcggttttcgcgagtcgggttgtagggacgttttcgagagttttgcgggtttcgcggtcgtgttttcgcgttttcgtgcgggtttcgggtgcgttgggcgggcgggcggcgcgaggggaggttgtgttattttagtaatttaggggtttatttaggttttttatttttttttttgtaggtgattcgaggagggatttcgttttcgagcggttgaggatttcggtgtagaggagtttggttcgtagaattgtagagtcgtcgtttttttttataatttggtttcgttttattttgtcgtatttagtttttggatttttgtttttttttttttttttttgttaaacgatttttttaagataatttttaaaaaatttttttttttgtttatttttgttttttagtttttttatttttttatcgaaagtaaattatttaacgattttcgatttttcgacggtaggagtttttcgattttttaggcggatcgtttttttttttcgcgcgcgggtttcgggttcggcgagagggcgcgagtatagtcgaggttatggaggtgacggcggattagtcgcgttgggtgagttattattatttcgtcgtgtttaacgggtagtattcggatacgtattattcgggttttagttatttttatatggacgcggcgtagtattcgttgtcggaggaggtggatgtgttttttaatatcgacggttaaggtaattacgtttcgttttattacggaaattcggttagggttacggtgtagaggtatttttcgatttattacggtgagtgcgttcggggtgtcggggttttcgtcggtcgttttagtcgtttcggttcggggaggtcgggagggatttgagggcggggagaggttaagcgaaagtttttatttgtcgtttttggtttatttataaaaaaattggggttcggaaatgggcgaggaaggtttttggttcgtcgcgagagtgtgttttgaaagagtcgtagtaggcgtttttttcggttggtggttttggggtttggcgtttatttggcgggcgttaggtcgtagtttttcgtttttgcgcggttgtaggttttggggtggggggtttcgggatgtttttaagcgcggggtgttttggttttgttttcgcgggttcgggttttttgggttcggtagtcggcgtcggataagtacggttggaattcggtttttttaaaaaatttggcgttttttgttattcgttagttttttttaggcgggtgggcggggtggagggggttttttgttagcgttttttaattcgtatatttttagaaaggttttagagatttatttatttatatttttttttttgatttttttttagagttagtgtttttggtttttagataggttttttattttttggttttaggaatggaattttgatgttgaaggggtttgggggggaagatttttgttttaagtttgagggatttgagattttttagattttcggttgtatagaatttttttgcgtttttgtttttaagtcgtttttttgtttgtaatttttgttttattttgtttttgggtattgttttttattagttttttatttaagatgtaggatatattttcgtttaaataaaggtaattttagtattattttttttttttttttatttggagaagtttaggagagttttgaaatgtaaaaaaagaagattaggtttgtgtagtttgaggaaaaaagatcgaatattttttagttttaagtttgtttttaaagaagaaataggggtaaaatatcgggtagaaaaagtgtggggttttttgagtttagttagatcgaattttgttttgatttttttatttagagtttgttttgatacggatgatatagttttttcggtagtaggcgttttttattttgttgtcgttaggttttaaataatcgtttttgcggatggggcgttttttgtttacgttttgtgcggattagtagttaggtggaaatgcggtagaggtagatttaatattatttattatattattttttgtataatatgaattttgatttttggtgtttagagaattttttttttttttttatttttttttttttttttttttttaagattttagttttagtattgtttttaatggttgaatcgaatgttaaatgttgaggtaggtattggttttaaagattaagaagtgtgtggatttgtatttgttttttaaatgtattttttagagtgtatgagttatagttattttaagattgtgcgttttaaatgaaggttaattagattttgtgtttgagttattttttatttaaaatatatatattaattggaattttgtgttttaggggtttaggtgaaaatttatttatggtattggtgggattatagttttattgagggtgtatggggtttacgttattttttttttttttaggatttgggagggtgagaaaagtagagaaaatggttattttagggtttagttttgggaattttttttaatagttcgagtaatgaaaacgtttttgtaaattttattttaggttttttgcgggtagtttggtcgtttttgagtaagtattgggttaggttttcggaaattaattttgaaagttttttgatttttgttttaaggttttttttttttgtatttggtgttgggagttgggtttgattttagggtcgttttttggtgtggagtagttgtgtggtcgggttttattttttaggtttttttatttatagtcggtttttttattaggttggttgggattaagttcgagttagggaatttagggttattgaaggaaatttataaattaagttaggttttagagagagattttggggaatgtgatttaggcggtgtatttggagaggttaaataagtaaaggggtttttttttttttttgtagtaatttttcgggtgttagttataggttttttattttgttatatttgatgggatatttttgtgggagagatgggtgaaggattttgtttttagtttgatttttaggtgtgttaggtaggtatttcggggatcgttaggatgagagagtgggtttgagttcgggtttttgttgaaaaggaggtcgatgcgaggtagagattttttaggtgtttttgacggttttttagggttatatttatttttttttttttttttgtttttttttcgttgttttatagg

SEQ ID NO: 58 - DNA, 7802 bp, Artificial Sequence
  chemically treated genomic DNA (Homo sapiens)
tttgtggggtaacggggaaagggtaggagagagaaggagggtgagtgtggttttgggaggtcgttagggatatttggggaatttttatttcgtatcggttttttttttagtaaaagttcgggtttaggtttatttttttattttggcggttttcggagtatttgtttggtatatttgggggttaggttggggatagaattttttatttattttttttatagggatgttttattaaatgtagtagaatgaagggtttgtggttgatattcgagaggttgttgtagagggggagaagggtttttttgtttatttggtttttttagatatatcgtttaaattatattttttaaggtttttttttagaatttgatttgatttatgggttttttttaatggttttgagttttttgattcggatttaattttagttagtttgataagagagtcggttgtgagtgaggaggtttgaaggatggagttcggttatataattgttttatattagaaaacgattttggagttaggtttagtttttagtattaaatataggaaggagaggttttgggatagaagttaggagatttttagggttagttttcggaaatttaatttagtgtttgtttagaaacggttaggttgttcgtaaaaggtttaaaatgggatttgtagggacgtttttattgttcgggttgttggagaaagtttttaaggttggattttgggatggttattttttttgttttttttatttttttaaattttaaaggagaaggagataacgtaagttttatgtatttttaataaagttatgattttattagtgttatgggtgaatttttatttgagtttttaagatataaaattttagttgatgtgtatattttaaatgaaagatgatttagatatagagtttgattagtttttatttaaaacgtataattttaaggtagttgtaatttatatattttgaggggtatatttaaaaagtaagtgtaaatttatatattttttgatttttaaagttagtatttgttttagtatttgatattcgatttaattattaagaataatattgaaattaaaattttaagggagaggaaggggaggggagtggagagggaaagagagttttttgaatattaagggttaagatttatattatgtaggaagtagtatagtaaataatattaagtttgtttttatcgtatttttatttaattgttgattcgtatagaacgtgggtaaagagcgttttattcgtagaaacgattgtttaaaatttggcgatagtagggtagaggacgtttgttgtcggaggggttatgttattcgtgttaaggtaggttttgagtaggggaattagggtagaattcggtttggttggatttagaaagttttatattttttttgttcgatgttttatttttgttttttttttaggaataaatttagagttggaaagtgttcgattttttttttttaaattatataggtttggttttttttttttatattttagaatttttttgaatttttttaggtgaaagggagaaagaggtggtattggaattgtttttatttaaacgggggtgtattttatattttaggtgggaggttaatggagggtagtatttagagatagagtaaggtaagagttgtaggtaaggaggcgatttgaaagtaaagacgtaagaaaattttgtgtagtcgggaatttgggaaattttagattttttaaatttaagataggggtttttttttttaaatttttttagtattagaattttatttttgaagttaggaggtaagagatttgtttaaaaattaaaggtattagttttgggaaaaggttaaggagaagggtgtgaataaataggtttttggggtttttttgaaaatgtgcgaattgagggacgttggtagagggttttttttatttcgtttattcgtttagaaagagttagcgggtaatagggaacgttaggttttttggaagagtcgggttttagtcgtgtttgttcggcgtcggttatcgggtttagagagttcggattcgcggaggtagagttagggtatttcgcgtttggggatatttcgagattttttattttaaaatttgtagtcgcgtagagacggagggttgcggtttggcgttcgttaggtgagcgttaggttttagggttattagtcgggagaggcgtttgttgcgatttttttaaaatatattttcgcgacgagttagaggtttttttcgtttattttcgggttttaatttttttgtaaatgaattaggaacggtagatgggggttttcgtttgattttttttcgtttttaggtttttttcgattttttcgagtcgggacggttgaagcggtcggcgggagtttcggtatttcgggcgtatttatcgtggtgggtcggagggtatttttgtatcgtggttttgatcgagttttcgtagtagggcgggacgtggttgttttgatcgtcgatgttaaaaagtatatttatttttttcggtagcgggtattgcgtcgcgtttatgtaggagtggttgaggttcgggtggtgcgtgttcgggtgttgttcgttgagtacggcggggtggtggtggtttatttagcgcggttggttcgtcgttatttttatggtttcggttgtgttcgcgttttttcgtcgggttcggaattcgcgcgcggggagggagggcggttcgtttgggaggtcggggggtttttgtcgtcggagggtcgggggtcgttgaatgatttgttttcggtggggggatgggaaggttgggaagtaaaggtgagtaaaggagaaggttttttaaaaattattttggaggggtcgtttagtaaagagaagaaggggaagataaaaatttaaaaattgggtacggtagaataaaacgggattaggttgtaaaaaggggcgacgattttgtaattttgcgagttaggtttttttgtatcggggtttttagtcgttcggaggcggagttttttttcgggttatttgtaagggagagaatgggagatttggatgagtttttgagttgttggagtggtataattttttttcgcgtcgttcgttcgtttagcgtattcgagattcgtacgggagcgcggggatacggtcgcggagttcgtagggttttcggggacgtttttgtagttcggttcgcgggagtcggggttggttgagtaatttggagggtaagttttagggttgattgttacgatttggagggtaagtttttttttcggggatatcggtttcgggatcgtttttttagtttttagaaaatttttaaaagaggagagttgagtttttaaaattgatttaggtttttttaagtggttgggggtaaaaaattaaatttaaaaaaaaaaaaagttattagtattaatttgggtagcgaagagtagagaggaggaggaggcggcggcgtacgatttgttcggttagattgcgttgttcgttttgtttcgtttttttttcgttttttttttttttttttttttttttttttttttttagtattttttttttttttttatagggaatgtattttttttgaaagtattaagacggcgttaggtagtttagtgttcgtagatagttgtggcgcgacgtaatttaaggaggttttagtgttattcgcgtcgggggggaggagtttggcgttggcgagtaggggataggattttcggtataaggaaattgtaatttaaattcgttttaggattttttttttcgtttcgcgtattttcgttttttttttcgtttttttattgatcggaaaggggcgtcgtagagggcggtcgtcggcggaggggcggcgggtagggtgggcgaggttcgcggggtttgggggcggacgggagggaacgcgcgttttggttttttaaatgtggtcgcggtttttgttaatttattcgggtcgggtggacgatttcgtttcggtgtagttagtttgttttatttatgaagtttatttcgatgggtagaatttttttttttagatttttaaaaaataggtacgtatggattattattaggatttaatgtagggtgtttgggagagcgtatcgatgtggggaaacgtgcgcgttaaattgattagaaaaataaaatgttttatgttaaggtattttgagatttgtttttcgggtcgattttttaagagggtgagttatcggataaaggggagatgtttttgattggagcgttcgcgttaattttgttgttattgttatttttttttcgagttttttgcgtttttaagtttttagagtgaatacgttttagttgttgtagttgttttttttagatttaatatttgtaattaatgtgtgtttttgatttgagtggtaatagtgagggatgagaaggggggaggggaggaagagattggttttaatttatttttcgagtacgtttagtgtagacggatagaaagaattcggtttttattttagggatttaattttttttttcgtttcgttcggagttttatttatttcggttttcggcgttttttttatagttaaggaaattagttttcggtttgtatcgattttaatttcggtttttggtcgggattttacggcgatttttttcggttcgcgggtttttaggttacgttttgcgtaatgggtatttcggggcggagggtacgcggtttcgaggcgttttagcgagaggggcggggcgagcgggggcggggtttggagggattaattagcgggcgaggttgtggtcgagtcgcgattggttcgtttcgcgggttttaatttgtatcgttcgttcggttttttgagttattgtattttttagcggcgttcgggtggttgtagtcgttggttcgaaaatgttgttcgggcgagtaggggttaggcgggaaaagaagattttaaatttattttttgttcgtttttagggtaatgttgttaggagagggagtgggttttttcgtaggttattttatcgatggggttgagagtttaatttggggttttatttgaattggagatattgtttttttttcgtttttttattttataaaattttttataaatgtaaaaattcgagatagaagaagtcgtttttgaaagtaagttttgaaggattttttttatgcggtgaaggaataataataatatttaattttattttggtgtgtgagggtcgtcgtgttttaaaatattatttttgtagaaagattagtgaaatgtattggaagaagtagtggaaacgtgaatttttttggtttcgcgtttggattttttttggagtttttatttttttaaatttgatgtttgtttgaaattagggttgaatttttatatataggatagaaagaaagaattttaattttttaaagaaagtttttttttttttcgttacgttttttttgagtttatttggtttttcgttattaggcggtttagttaagaggtatcgattttttttttattttttgattattcgttttttttgggttagttaggttgttcgtatttttttttgtttatagcgttttttaaattttttaattatttagttgttgtttaatatttatcggaaatttttttataaataaggagaaacgaatgtatacgtatttttgttaagaagttcgggattaagatttaaggatataagttgaaagaaaaaatgaaaaatgttttttcgcgcgttaatcgaggggtggatgcgttacgtagcgtgagtttagtttatagttacgcgtaagattaaaagttgttatgggttttgcgcgcggagattttagagtcgaagagagaagttttcgcgttagaaacgttgcggatgttaggttttgaaaatgttgatttttgaggttaagaattattttaaagataaaaagaaaagattggtgaggaggtttttcggtgtaagggcgtttattcgttaattttggatggggaagtagggattattcgtttaaatttaatcgcgagtattaagtcggattggtcggggatggagaagggtaatttttatttttagaaaaataaaagatttcgaaggttttttttggtttgggtggtttgaggttggtagagaggggtggggggtttggggttggatgtttcgggtaatggagttagtcggtagggggtatttagtatttaatttttagtcggttcgttttagttttcggattgatagtgggtaattgggagagaggacgttgtttttttgatggttcgcgtcggttagtttcgtcgacgttatattgggtttgacgttacgggtttagtttcggagttcggagtatagggtagcggggaagggaaaaggatgggagggggatgtcgaggagggagggtcgaggtcggtttcgggatttacggggaaggaagggggaagggagcgaggttggagaggttgcggcgcgtggtttgaggcggagagtcgggttgcgggggttcgggttaggttaggcgtcggtttgattcgtttcgtcggtaagagtaggtcgggttttttttttttttggcgggcgggggagggaaagggggattttggtcgggggtaagggggaaaggtggttttgattttttttgtgttatcgttataaagttgattttggttttttgcggagaagtttgagcgttttttcgtagatttgacgcgatttttttttaggtatttgggtttcggtttggtttagcgagtttttttttttttaaggagtagtcggcggagttcgggtggaggaaagcgaggaggcgattaggaggatgtcgtcgtcgtcgtcgtagggttcggggtttttgtagggcgtaaggttttttttattagggtaaggggttggcgattaatttggacgtttgggattttgggagtaagtatttcgtagtcgagtaggcgacggcgcggttatcgtttagagaggagtcggggttcggggcggcgtgcgggtcggtagtagtcggtttggtttattcgaaattttaggtttggaagcggttgttttaggcgttaagttgagcggggtatgtgtgtttttttgggaaaaaggtgagaaatggagtcggattttttttattcggtaggggttaagttattatatatatttttaaatatatgtttacgtgtaagttttttttattcgtttttttaggggcgaagagattttgttttagtggaagtggggaaatttagtcgggtatagaaagtagaggttatggcgtagagcggaggcgcggttttttggggtttagttttagggttatagatttagggcgcggagatgttcgcggtcgggttatttattagagttaggtaatcggcgtttttaggcgagtttcgcggggtcgaggtgtcgggagaagcggtttcgggcgttcgcgcgttgttcgatttgggtaataggtaaagcggagtttcggggtcgaagttttaaagttattaatttcgcggagggggagagagcgtgtttcgggtcgttcggggcggttatttgagcgtgtttatttaaagattttgtaagtagagcgcgcgcgaaatcgtcggatttttagcgaggtagtaaatatttgtaggtagaagaaagaagcggagtcgagtcgagtcgtcgagttttttttttcggagtttcggagtttcggcgtttgtttgggcggtttcggtcgcgtagatagaaaagaagtcgggaatttgcggggttggggggcggggagcgatattaaaggttagaaattgtagtacggttcgaggttttggcgagttgggtttgggggaggagaagtttttttttatttta

SEQ ID NO: 59 - DNA, 6385 bp, Artificial Sequence
  chemically treated genomic DNA (Homo sapiens)
  unsure (5467)
gttatagtattaataagtaatagaattgaatttaaaatgttttgttttaattattaagtgttgttttttttattttttagagaaaagttaagaatataggagattgtttatatgagttgatatgtaatggttttgataggttttattgggattttttatttatttaaaaattaaaaaattatatagttataaggtttttagaattgattaagttttgttttcgttttatttggtaggtgttgtttaatgaggttgagtgatttgttaaaggttattttatgagtttatggaaaatgattaatgttatttttaaaaattagttaaaagtattttttattaagtttatttttatggtttattttaagtaggttaataagtatattaggtatagtttaaatttaattgagtaaatgttgatattagtttatagatttagtagataagtagtaataaggaattatttattttttatttattatttagtttttttaaggtgtaagttataaagtgaagtaaatagtagtttaagagttttttatatacgtgagattaaaatagtgaaaaataaattgatttttaaagttatatatttataatgcgtttatgtttgaggttttttgaaatatgaaaaagaataatatttgggaatattttttgtattttagaaataggtatattttttatatagagttttatatttgatttttagatatatttaattattaatttatttttttgagtatgtattgtgtatttattttgtgtagattattgtaggggattatagaattattaaaggatattttagttattaagaattttttaaatttattgaggtgataaaataaagtatatatgtatgtatgcgcgtgcgcgtatgtatatatatatatatatatatatatatatttgaattttaattttataaatttttgtgtggggacgttatatgatgtttagagttagtgggtgttaggggagtgtgtgtatggggataggagggaatggaaagattgtttggtgtgagtaggggagttataattaggaatatatgaggaggtggttttgcgcgtttagttgtattttttttttttgtttaaatattattggagaaaattatttggttttaatttttttagttagatttttttttttttgttttgttatttaggttggagtgtagtggtacgattatggtttattgtaattaggtttaagtgatttttttgttttagttttttgagtagttgggattataggtatttgttattatatatggttaatttttttatttttagtagagaaggggttttattatgttggttcggttggtttcgaatttttgattttaagtgatttttttatttcgatttttcgaagtattgggattataggcgtgagttattacgtttggtcgttagttaggtttttaaattattttaaagttatgattataattttaattagtttgtgtttatttaaatgtgtttttttatgtaagagaaattatagatagtaagttggatatggggtttatgatttaaatgtagattaatattgagaaggaaggtaaatttttattaatataaaattttatttaatttaatttggtagttttttgtgtaatttaattttttatggtattgaatttagggttgggtatagtggtttaaatttataattttattatttttggaggttgaggaaggaggattgtttgagtttaagagttgaaggttatagtgagttatgattatgttattgtattttagtttgggtaatagagtaagattttgtttttatagaaagtaaaatgataattaaaaaaaaaaaagttgggtatggtggtgtatatttgtagttttagttatttagaaggttgaggaaggcggagtgtttgagtttagaagtttaaggttgtagtgagttatgattatagtatcgtattttagtttgagtattagagtaaaattttgttttaaaaataaaattaaaaataaaataaaaaagatattatttttaatattttttttaatgataatagtatttattaatggttggtttaatgattaatatttggttgggtgtagaggtttacgtttgtaattttaatattttgggaggttaagggcggtggattatttgatataaggaatttgagattagtttggttaatatgatgaaattttatttttattgaaaatataagattagttggtgtggtggtaggcgtttgtaattttagttgttcgggaggttgaggtaggagaatcgtttgaatttgggaggtagaggttgtagtgagttgagattgtattattgtattttagtttgggtaataagcgtgaaattttatttttaaataaataaataagtaaatgtagattaatatttatagatatttattaggttttttttttatacggttgtattgttttttttatgtaaagtgattttaggtgttttgagttttttgttgtttgggttttgttttttagttaataaatttattgagtgttgtttgtaggtttaggtagtggtggagattttatagaagtttagttttttttatattttagttttatatgcgtgatttgttttatttatttattagttaataaatatttttttttattttttgtgagtttggcgttggttaggttgtaaagatataaaatgaatagaagtgttttcgaattttagtaatttagagtttgttaggggagggaatacgtggatgtgtatttttaggggtaggggatttgaagcgtaagggggcgaaagtgggttttacggagtttttaggatatcgaaattggtttgggcgtttgaagttaaggttaggttttttgggtaaggtagatttgtggtattttaaaggatgagtaggcgtttgttgtttataggaaggttattttgagtttaggatttagtttgaattaggttgttttgtagtttcgagtggagggcgcgaggtaggaatgtaagtagaagtacggcgttgagggatgttagaatgttggaaaggtgagtaggattcgagtagtattttagatatagcgttttggttatggtataagaaggcgtaagtttttggttgttggttttgttttgtatttaagtagggtgatgagcgtttttcgttgagttatttattttttatcggagaaggaattttggttaaaatgaagtcgtacgttataggttagttttggaggatttatgtggtgtgtttcggtagtagggtacggcggttgtgtggtttgagtttaaattgagggttaagaggggataaaatttaagttaattttagtttttaaatttggagttttgttttgggaaggaagaggagtgttcgtttgatttagaaggttaagtattttgtaattttgttttttttttgtattttttttaaaggtggtgggatgatataggattataatatagataattataggggataatattatgatgtaaggatggattgttagattttgtagggtggatttatttattttttaggaggtgtagaggtgaagaggaagggtttagattaatcgattttttttttttatttgaattttttttattttgatttattattttttttttaattttaagtttaatttttattttttaaataggttaaaaaatatttttttgagatagatttttattttgttgtttatattggtttttaatttttgggtttaagcgatttttttgttttagttttttaaagtgttaggattattggtgtgaattattatattttatttaaataagttttttaatgtgaaaaattttaaatataataaaaatagagagtagaatatttattttttagttttgataaatattattttatgattagttgtttaatttatatattatttatttttttttatatagtgttaatttataaatatttggattttatttttggtttttttttttttaattataaataaaattttgttaggttgttgttttgtgtaaagtttgtttttgtttttttaaggataatttaaagttttttttaggttagtttttttattttttttggggagagatggggaatagaggagatgagagattttttgggttttaggtattttgtattaacgttaaatttttggatttataaaaatatgtttgtagaataaggtaatattaaagttttttttgataagtaatataaaaattattgattaagattataattaataattgtatattaaagattcgggaagtttttggtttttggggcgtttttttttaggtttgtttgggtcgtttgatttaacgtttggataaaataaaggtttttgtttttcggtatcgcgcggttttcggagttgtatttttaaattttcgtggcgattttatttgaagcgtggaagaagtaattacgtaagtggagagtgggttttgaaagttttgggatgaattattttttttttttttgtcgttttttttttaggatttcggttgcggcgaggaggaaggagttagtttagtagtttttgcgtttgtggtcgcgggtgttttggaggtttttcggtgtgacgagtgggggattcgaaggttcgtgcgttatttttaggtttggacgttgtttttcgttttttgtttttaataggtgcgtcggatttttaggttttggggtgaatttagttgtttttatattagttttcggaattattaaaaatttaaattgggatttttcggagtaaataagagtttagagttttttgtttaatgttggatttaatacgtatatatttttaagcgagttggtttttttttttttgatttttgattttcgcgatagttttttttacgtatattatcgttgttgtcgtcgtttttttttttcgcgtggttttttgatttgcgagggagagagaggatatcgaagtcgggagttcgtagggattatgtattagagtttggttatggtcgttaattacgggtcgtttttcggtgtttacgaggcgggcggtttcggcgtttttatgtacggcgcgggcgtcgcgttttcgttagtttacgtgtttatatcgcgggtgttttttttcgtgttgggtttgttttatttttagggcggaggcgcgggttttgcgttcggaggcgtttcgggcggtagtttcggtggggtcgcgtttggtgcggggttcgggatttagtagggtagttcgggatggagttaggcgggagtcgacggagtcgtttatatttcgtcgtcggtgtcgtcgcgtttttttttttcggggattatcgggtttttggcggtcgtcgtcgtcgttgtcgcggttcgggaagttgcggtttatagtagtggcggcggagcggcgggtgcgggtttggcgggtcgcgagtagtacgggcgcgtcggtttcgcgggtttttattttagtttttattcggtttatatggtcgacgtgggcgcgttttgggtcgtagncgttttcgttttcgtcggatatttcgaggattagttttttttttttttttttttttttttttgagacgtagttttgttttgttattaggttggagtgtagtggcgcgatttcggtttattgtaatttttgtttttcgggtttaagcgatttttttgttttagtttttttagtagttgagattataggcgcgcgttattacgatcgttaatttttttttttttttttgtattttagtagaggcggggttttaataggttggttaggatggtttcgattttttggtttagttttttttattttaagttagaggttttagagggttttggagaggatttcgtaagcgcgtaaggttagggcgtcgcgtttcgtttcgtattttcgtttgcgggttttattgtgtggttatgtcgtcgcgttatttcgtaaaagtcgcggcgaggttcggtcgggtttttttttttttgggggtggtcgtttggtttttttaagaggggtgagggggaggggaatattaagagttatagatcgggtttcggcgttatttttagggttaattagtttgtcggcgatgtgtatttggttgtattttcgggaattttttttggttatttagggttagaggataatttaaaagcgttttaaagtttaggtttttttcggagttagtttaagattggaaatttggtaggggtagtttttattttttaaagtgagaataaatgtagaaggatttagtatttagtaggtggttaataaacgcgagttttgttttttaagtttgggtttttttttttttatagggtgggtttaatttaaatttattttttcgttttttttcgaaattttagaggtcgtttgtattttgaattaggggttgttatttttttttttttttcggttcgtgtatttaggttttt

SEQ ID NO: 60 - DNA, 6385 bp, Artificial Sequence
  chemically treated genomic DNA (Homo sapiens)
  unsure (919)
aggggtttgagtatacgggtcgggggagaaagggaagtggtaatttttagtttaaaatgtaaacgatttttggaatttcgggaagagacggaggagtgagtttggattgagtttattttgtgggggaggggaagtttaggtttgagaagtaaagttcgcgtttattgattatttattaagtgttaaatttttttgtatttgtttttattttgaagagtaaaggttatttttgttaggtttttagttttgggttggtttcgagaagggtttaggttttgaagcgtttttaaattgttttttggttttgggtggttagggaaggttttcgggggtgtagttaaatatatatcgtcggtaaattgattaattttgaaagtggcgtcgaggttcggtttgtggtttttggtgttttttttttttttattttttttgggggagttagacggttatttttaggggaggaggggttcggtcgagtttcgtcgcgatttttgcgagatagcgcggcgatatggttatataatggagttcgtaggcgggagtgcggggcggggcgcggcgttttggttttgcgcgtttacggggttttttttagggttttttggggtttttgatttaaaatagggaggattgggttaggagatcgagattattttggttaatttgttgaaatttcgtttttattaaaatataaaaaaaaaaaaaaaaattagcggtcgtggtggcgcgcgtttgtagttttagttattggggaagttgaggtaggagaatcgtttgaattcgggaggtagaagttgtagtgagtcgagatcgcgttattgtattttagtttggtaatagaataagattacgttttaaaaaaaaaaaaaaaaaaaaaaaaaggattggttttcgaagtgttcggcggaggcggaggcgnttgcggtttaggacgcgtttacgtcggttatgtaagtcgggtaggggttggagtaggagttcgcgaagtcggcgcgttcgtattgttcgcggttcgttaggttcgtattcgtcgtttcgtcgttattgttgtaggtcgtagtttttcgggtcgcggtagcggcggcggcggtcgttagggattcggtggttttcgggaaggagaagcgcggcgatatcggcggcggggtgtaagcggtttcgtcggttttcgtttggttttatttcgggttgttttgttgggtttcgggtttcgtattagacgcggttttatcggagttgtcgttcgaggcgttttcggacgtagagttcgcgttttcgttttggaggtaggataggtttagtacggaggagggtattcgcggtgtgggtacgtagattggcgaggacgcggcgttcgcgtcgtgtatgaaggcgtcggggtcgttcgtttcgtaggtatcggggggcggttcgtggttggcggttatggttaagttttgatatatggtttttgcgagttttcggtttcggtgttttttttttttttcgtaggttaaggagttacgcggggagagaaaacgacggtaataacgataatatgcgtgggaggaattgtcgcgaagattaaaaattaaaggggaaaaaattaattcgtttaaaaatatatacgtattaaatttagtattgagtaaagggttttaggtttttgtttatttcggaaaattttaatttgaatttttggtggtttcggaagttgatgtaggagtagttgaatttattttagggtttgaaggttcggcgtatttattgggggtagaagacggagggtagcgtttaggtttggaggtggcgtacgagttttcgggttttttattcgttatatcgagaggtttttaggatattcgcggttataggcgtagaagttgttaggttggttttttttttttcgtcgtagtcggggttttaaaagaggaacgatagaaagagagagggtggtttattttagagtttttagaatttattttttatttgcgtggttgttttttttacgttttaaatgaagtcgttacggggatttgggggtgtagtttcggaggtcgcgcggtgtcgggaagtaggggtttttgttttgtttaggcgttgggttaggcggtttaggtaagtttggggagaggcgttttagggattaggggtttttcgggtttttggtgtgtagttattggttgtgattttggttaatgatttttgtattgtttgttaggaaggattttaatgttattttattttgtaagtatatttttgtaagtttaaaagtttggcgttaatgtagagtgtttgggatttaagaaattttttattttttttgttttttatttttttttaagaaagatggggagattggtttagaaagaattttagattgtttttggggggataaggataaattttatataaaataataatttaataaagttttgtttgtaattaaaaaaaaaaaaattagaagtagagtttaaatgtttataagttaatattgtgtgggggaaagtgagtaatgtatagattaaatagttggttatgaaatgatatttgttaaagttgagggatgaatattttattttttatttttattatgtttgaaattttttatattaaaaaatttatttaggtggggtgtggtggtttatattagtaattttggtattttgggaggttgaggtaggaggatcgtttaagtttaggagttagagattagtgtgggtaataaagtgagagtttgttttaaaaaaatgttttttaatttatttaaaaggtagaaattgaatttaaaattaaaggaagggtgatggattaaagtgagagaggtttaaatgagaaagaaagatcggttgatttgagttttttttttttatttttatattttttgggaggtaggtgaatttattttatagggtttggtaatttatttttgtattatagtattgttttttgtaattatttatattgtaattttatgttattttattatttttagagaaagtataagaagagggtagaattataagatgtttgattttttgggttagacgaatatttttttttttttttagggtagggttttagatttggggattaaaattggtttgagttttgtttttttttggtttttaatttgaatttaaattatatagtcgtcgtgttttgttgtcgaagtatattatataaattttttaaaattggtttgtagcgtgcggttttattttaattagagtttttttttcgatgggaaatgggtgatttagcgggaggcgtttattattttgtttgggtgtaaaataaaattaatagttaggagtttgcgtttttttatattataattaaagcgttatatttgaagtgttgttcgaattttgtttatttttttagtattttaatattttttaacgtcgtgtttttgtttgtatttttgtttcgcgttttttattcgggattgtagaatagtttgatttaagttaagttttgggtttagaatggtttttttataggtagtaaacgtttatttattttttaggatgttataagtttgttttgtttaggaagtttggttttgattttaggcgtttaggttagtttcggtattttaagggtttcgtagaatttattttcgtttttttgcgttttagattttttgtttttaagagtgtatatttacgtgtttttttttttagtaagttttaagttgttgggattcggagatatttttgtttattttgtatttttatagtttgattagcgttaggtttatagggaatggggagaagtatttattggttggtggatggatgaaataaattacgtatgtggagttggggtgtgaagggagttgaatttttatgaaatttttattattgtttagatttgtagataatatttagtgggtttattaattgaaaagtaaagtttaagtagtaggaaatttagagtatttgaggttattttgtataagaaaaataatgtagtcgtataaaaaaaaaatttagtaagtgtttataaatgttagtttgtatttatttatttatttatttagagatggagttttacgtttgttgtttaggttggagtgtagtggtgtaattttagtttattgtaatttttattttttaggtttaagcgatttttttgttttagtttttcgagtagttgggattataggcgtttattattatattagttaattttgtatttttagtagagatggggttttattatgttggttaagttggttttaaattttttatgttaggtgatttatcgtttttgattttttaaagtgttgggattataggcgtgagtttttgtatttagttaaatattagttattaagttaattattaataaatgttattattattaaaggaaatattgaaaatagtattttttttgttttatttttggttttgtttttgaaatagggttttgttttgatgtttaggttggagtgcggtgttgtgattatagtttattgtagttttgaatttttgggtttaagtatttcgttttttttagttttttaagtagttgggattataggtgtgtattattatatttagtttttttttttttaattattattttattttttgtaggggtagggttttgttttgttgtttaggttggagtatagtggtatggttatggtttattgtagtttttaatttttgggtttaagtaattttttttttttagtttttaaaaatggtgagattatgggtttgagttattgtgtttagttttggatttaatattataaagggttagattgtataggaggttgttaagttgaattaagtggggttttatattagtgagaatttgtttttttttttagtattaatttatatttaggttatagattttatatttaatttattgtttataattttttttatataggggggtatatttagataagtatagattaattggggttatagttatagttttagaatagtttaaagatttagttgacggttaggcgtggtggtttacgtttgtaattttagtatttcgggaggtcgaggtgggaggattatttgaggttaggaattcgagattagtcgggttaatatggtgaaattttttttttattaaaaatagaaaaattagttatgtgtggtgataggtgtttataattttaattatttaggaggttgaagtaggagaattatttgaatttggttgtagtgagttatgatcgtgttattgtattttagtttgggtgatagagtaagaaaaaaaagatttagttgagggagttgggattagatgattttttttagtgatgtttgaataaaaagaaaaaatgtagttgggcgcgtaaggttatttttttatgtgtttttagttgtggtttttttatttatattaggtaatttttttatttttttttgtttttatgtatatatttttttgatatttattgattttgggtattatataacgtttttatataaagatttatagggttgagatttaagtgtgtgtgtgtgtgtgtgtgtgtgtgtgtatgcgcgtacgcgtatgtatgtatgtgtgttttattttgttattttagtaggtttaaaaagtttttgatggttggaatattttttagtaattttataattttttatagtggtttgtatagagtaggtatatagtatatatttaaaagaatgaattaatgattgaatatgtttgaaggttaaatatagagttttgtataagaaatgtgtttatttttgaaatgtaaaaaatgtttttaagtattatttttttttatattttaggagattttaggtatagacgtattataaatgtatagttttgaaaattaatttgttttttattgttttgattttacgtgtgtggggggtttttgaattgttatttgttttattttataatttgtattttggaaaggttggatgataaatgagagatgaataattttttattgttatttatttgttgaatttataaattggtgttagtatttatttagttgggtttaagttgtgtttggtatatttattaatttgtttaaaataagttataaaaatgggtttggtagaaggtatttttaattaatttttaaaaatgatattggttattttttatgaatttatggagtgatttttggtaaattatttaattttattgggtaatatttgttaaatgaaacgggggtagggtttgattagttttaggagttttgtagttgtgtaattttttgatttttggatgagtaagggattttaataaaatttgttagagttattatatattagtttatgtagataattttttgtatttttggtttttttttggagggtgagggaggtagtatttggtagttagagtaaggtattttgagtttaattttgttatttattagtattgtgat

SEQ ID NO: 61 - DNA, 8513 bp, Artificial Sequence
  chemically treated genomic DNA (Homo sapiens)
tagatggtgaaatttgagttgatggggaggaggatttttattttttgtaggggtttgatgggtagtatagttggttaattttgggatttagagggtaggtcggttggttgattattaggtttggaagatttaggtagttggttttaaagaggttttaggttagtagttagatatgagttgtgagggttaagtatagttatttattagatgatttatttttagtttttttgagttttagataatagaagataggtggttgtatttttggttaagggtaggtgtggtagtggtgtttgttgttattgtgtttttattggtttttagtaattagatttaatagacggagtaattgttattcgaggtttttgaattagggttatttattaggagtatgcggttttttgatgtttagttttggttggtgttgttgtgggtattggtgcgagtataggggatagggtttgtgtgttttttttgtgggggttttaaattggtattttaagtagaacgagttttggtgttggagttagttaagtagtaaattttggatgggttgtatttgattagtcgttttagaataatttattttttattttaggtagcgttgattagagtttttcggagattatagttagggagtgtggttttagggaatggggaggaggttattagttttgttattgttataggtgggtgagggagagagtaataggtaaagagtagatagggaaagggaggtagaaggggagtttggtaggagtagtagagggagtggggtgtggtaggagaaggaggagttggggtagggattggttgtagaggatataaagtagtttttatttttttagaggtaggttcgagggagagtagtgggtagggtttggggagttttagaggagagttttatttttatttatatttttttttttttttttgtttttcgggtagattttattttagtttatagttttttgtttattttttatttgtttatttttcggttttattatttgtattatgttcgtttgtggttgtacgtgttttttattttttttggtattttttgtttgaggatttttcgatggggattaaggaggaggcgttaagggtttcgtatttttttggttgagtattatattattaatttgggttggtatattttaattttgttttttagtggtttgaggggtgagaagtttggtgttttgaaattgtaattagattgtagatttttagaaggtaatagtatagttattggataatcgaggcggtttttggatatagtaggatattagtagttttttttagagtttaagattcgagttaatgagtttggagtaggtcgggttaggaggaggatttttatttgtgagtttgcgatttttttatgttgtaggcgagattattacgtagatttttaggaattgggatggcgggattggatattgtagttcgaggggtattagttgaattattgtagtgggtagtgttttttttatttggttggtagtttaggtattgttgtttttttttattttgtcgtttttagtttttttaaagttaataatttttggtttgttagtattttttgttgtgtttttattgttcgaaggttttttttttttttttatttggattataatggtaatgtggttaagacggatgtgttagatatggtggtggaggtttgtggttgtagttagtaagaggatttggggttttggagtgaagagattaagatgaagttttttaggtatagggtatttgtgattggaggtattagatttttgatttatattttaatttaataattatttggtaatatgatttatttgatttttatgggatttaaatgggtatttttttgtttgagattttggtttattttaggttggttgatgtgttgggagatgggtaaagcgttttttttaaaggggtttatttagaaagtatgattttttgttttaagttttgtgagaagatgttagggattagggagggagggagggaaggtagagaaaaattatttagttttttttaagatgagaaagtttttaagtgaggggaggaggaagtagatagatggtttagtaggtttgaagtagggtaagtaggttggtttagggtaagggttgttgaggtattttaagggaaggttaagagggagatgggtaaggcgttgagggaggatgtttaggggatttttagaaataggagttaggaaaatgaggtattaagtttaagaagttttttggttttttttaggggataggatttattgggagataagtatttatattttttttttttttttttatttttttgagatcgagtttcgttttgttattaggttggagtgtagtgatacgattttggtttattgtaattttcgttttttgggtttaagtgatttttttgttttagtttttcgagtagttgggattataggcgtttattaatttttgtatttttagtagaaacgaggttttaatatgttggttaggatggttttaattttttgattttttgatttattcgatttggtttttcgaagtgatgagattataggcgtgagttatcgcgtttggtttatatttttttaataaaaaggagaaagaaaattaataaatgtgagttataaagaagggttagggtgatggtttagagtaatagttttttaagtgtattttgtaggtttttgggaggtttttttttaggggtgtttataaagttaaagttatttttataataatattaatatgttatttgttttttgaatttttattattttaaaattgtattgtggagttttttagaggtcgtgtgatatgtgattatattatttttttgatattattgttaatggaatgtgtgtttgtatggttttgtgttatagttttttttagttttaatttttaatgtggtgaattgatagatgtaaattatatgaataaaagtttaatgatttttttttttttgagacggagtttcgttttgtcgtttaggttggagtgtagtggtataatttcggtttattgtaatttttattttttaggtttaagcgatttttttgttttagttttttgagtagttgggattataggtttgcgttattatgtttagttattttttgtatttttagtagagatggggttttattatgttggttaggttggtttcggatttttgatttgaggtgattcgtttgttttggttttttaaagtgttgggattataggtttgagttattgtgtttaatttaatgatttttaagagtatagaggaaattaaaaagtttgagatttattggtttatagaattgggtggggagaagaaagtaaggtgttttaagagagttttttttgttgggtatcggtggttttagttatttaggaggttaaggtcggaagatcgtttaaatttaggagttcgaggttatgattatatttgtgaatagtttttgtattttagtttgggtaaatagtgaggtttcgttttaaataaaaataaataaatatataaatatataaatagtttttttggaagaaggggttcgaggttgggataggagtatgtgtggggtgttttttttttagtgtttattagtttggtttgattgagttgggtttttgatttttttggggataattagtttgggttaaagttttagatttttttttatttttattttttttttttttttttgatttttagattgaatagttaatttattgattttttatatttaagggggtggtttttggaagtagagttaggatgtgggaggtttgtttgtggggttgaaaaaaaggggagagggtgttttttttttttgttatgttttttttttttttttataaaaattagagattgaaatgttgttttttttttatattcggttacgatggtaatgtaaatttaaagaggtagggtatttttttgttaggtagtatcgttgggtatagtaatttttgttttttcgttttttagagtttatatatttattttttgggtttttaagtgggttttagtgaggggttttttttttaattgggttttttttttagttttttagtttttttgtttcgatttcgagcgggtgttatgtgtgagaacggttagtagagggagtagaaagtttggaagagtagttagagtttgtagtgacgtggtgcggaggggcggtattttttagaatttcgagacgtagagtcggggttttagggaaaggggttttagttttagggttttttggtgatttcgtgaattatattttgtatttagagttttagtcgttgttttttgtttttatgttttatagattttttatttttttttagagtttttaatttaatttgatttgttttaaatcgtaattttgtttcggtcgttgtaagttttatttaaagggtgaggtttgtagataaattataggatggtagaatgtttagttagtattaattaaaggcgattattttatttttattattatcgttttcggttgaatttttttttttgtttcgtaatattttttttaatttggttgtcggggtttttttggggtagtcgatttagaaatttaagtcgggatttagtatttattaatagtagcgtgtttagtcggggcgcgggggggggcgtaacgagtatagggttttttaagggagggggaggattttgggggttttgggggtgtaataagttcggtatttttttttttgtttttagttatttcgttttattttttagaacggtaagagggagggaaatagaagggaggtgaggggcgagcgggaagagcggcggcgcgttagcgttggagagagaaaaagtttttgtaaaagggaaaaaaaaagtttgcgtttttcgcgggtggttcgggtttgcggcgcggttgggtcggcgggagggttgggggttaggttgggggggtgggggtggtatcgaggttgcgttgtcgtggtttttttcgttttttttttttatcgtatattttttagtttagattttagttttggatcgcgtatttcgagtttagcgtttagatagaggtgagaagggggggtaggcgggggattatttgggagtagtgggggagggggtttgaggggatgtttagttttttagggatttattttagattcgggatatagaggtaaaataggggtgggagagtttggggtgagatattagaaattttagattttttatttgtgtttttttttgtattttttttttttttttttttttttttttgttagtttgtgtatttttgttttagggaatcgtgggtttttgttttcgttttttttatatattagaaatattttatttttatgcggttaagtttaagaggttggagggatggttagttggaggtttgcgttgtagagaggtaattttaggtgtgtgtttgcgcgtggggtaggaagatgttagtgtttttgaaaggtggggattgtaaaggagggagttttaggtggggtggggacgggtgtgtgggaggtaatagagttattaggggttagttaggtttgaatttttgatttgttttgtgatagatgtgttagtggatgtttgtgttttaggggaaaggagtgttttttggatttggaagggggttggggcgggggggggttgtttaaggtttagtgaaggttttagaatgattttatgtaatttggatttttgagttttaagggttgtgggtaaggagtttaggaggagtcggggagattttgttttgattttttgattttaggattatcggggtagcgggagttagtcgtaggagatttttatcggggttgggcgggattattggttattgttagtttgtgtattttcgttggtatttcgtttaaacgggagttggggatcgaggttttttttttggtttagattattttgtttgtttttgtttttcgttttgaatttttttttaggttttatgatttcgaaataattagtattgggtagttagttttcgggataggattacggaaaggggatttcgtagagtttggggattgagggttttaggggtttggagagttggggttttttaggataggtttttacgttttagtagagggagaaggcgggcggtttttcgggggatatgtaagggtcggaataagtgtggttttttttagggggcggggtttagagatttttttttttttattattatttttttggtattttcgtttttgacgttattagggggttttcgggggtttggaggggttaatttttgggaagtcggttgttataattagtaatttaaggtgttcgggtttttttttttttttatatatatttaattttattgatttagttattttttttgtttttttttttttatattttttggatttttttttttttttaattttattaacggggatttttattttttagtagtgtttttttgggcgttattgtttgtttttcggatgtgttgagaggaggagggaagaatgtggttcgttttttagtttttatttttatggttcgttttattgggttttcggggcgggtggggggagcggagtcgtttgtagttagtgtttgcggcggcgatttgggtgggtcgaggaggtacgggggcggggaaggcgggatcgggagtaggggggcggagtcgatttttgggagttggggagcgggggtgcgagggggacgttggaaaatagggagatatcgaagatggtttagggtttcggtaggggaattttagagttttttgttttatttcgaatttttatattttagaaaaattttatcgaagttaaaaaagttggcgatattttttttttattagtttgaaggggagatatgggtgggttgtggaacgcgtgggcgaggaggggtgtagttttatttttttggaggtttttcggtagttaggtagtggggtagaaagatgattgagtaggtaagtttgggggagtttttagtgtttgggggattatttgtaaattttttttttttttttgggtgagttatagagggaaggaggcgggagaattgtttttttatttagttgttaattagttgtgtttttcgttttttatattagttttaaggtcgagttgggaggttttggatgcgggattcgtatttcggttggaaaaggaggagttagaaaagggtatagtttaggttgtcgggtcgggttgggtcgcggggttcgggtttcgttttttattttatttcgtttttattttaaattttagtatttcgggattatttatcgcgtcggtcggttcggttcgttttcggtggttttttattttatttcgttttattttatttttattttcgggagattggaaaattcgggatggagttaaaattggagtttgaaaagaaaaacggatagtagtattttttttttcgttacgtttttataaggattatattgttttttttatttttttagagtttttttttatatttttttttttgtttttttaaaatagagattaaaaagattaggtgggtttgatttaaattattttagaataatattagtttttatttttgtgtttaatagatttagaagattttttttaggaattttatttttttttttatattgttttttgtttaagagggtagatggtttgtgtttttttttggttttatttggttttgtgtcgggattgtggttagggttttttttgttggatattgtagagattgtatacgggttgtttttggggaggggtacgagaaggaagggggaacgggttttagtagagtcgtttagtgtttgaagttagatttattatacgagtttttttattttatttttaaagtcggtttagggttatagtaagaagaattagagggtttatgttattaaaattatttgaagttaatataggtataattagtttaaaatatgttttttatatatagattatataggtaaagtttttatttaggtaaagtttttatttagtttttaagaagatttttagagtatatagattataagattgtttttgtttttttgggatattatttttttttatttttttttttatttagcgagtgatgttttttttgttttgagacggagtttagttttgttatttaggttggagtgtagtggtattatttcggtttattgaaattttcgttttttaggtttaagcgatttttttgttttagtttttcgagtagttgggattataggtattcgttattatgattggttaatttttgtttttttgtagagacgggggttttattatgttggttaggttggtttttaattgattttaggtgattttttcgttttagttttttaaagcgttggaattataggcgtgagttattgtgttcggtttagtgatgttttttttaattcgaatttcgtggtagatgttttagaggggtgggggatattagggatgttttgtttaggattttgtgtttgagattgttgtttgatagtttttattttttttatttttatatttattttttttttttgtagt

SEQ ID NO: 62 - DNA, 8513 bp, Artificial Sequence
  chemically treated genomic DNA (Homo sapiens)
attgtagaaagggaaggtaggtataaaggtggaggaaatagagattgttagatagtagttttaggtatagaattttgggtagaatatttttggtattttttatttttttaagatatttgttacggaattcgagttgaaaagagtattattgagtcgggtatagtggtttacgtttgtaattttaacgttttgagaggttgaggcgggaggattatttgaggttagttgaagattagtttggttaatatggtgaaattttcgtttttataaaaaaataaaaattagttagttatgatggcgggtgtttgtaattttagttattcggaaggttgaggtagaagaatcgtttgaatttgggaggcggaggttttagtgagtcgagatggtgttattgtattttagtttgggtgatagagttagatttcgttttaaaataaaaaaagtattattcgttgagtgaggggaggggtaaggggaaatgatgttttagagaggtagaggtagttttgtagtttgtgtattttggggatttttttgggaattgggtgggagttttgtttgggtgggagttttgtttgtgtggtttgtgtgtagaaggtatgttttggattaattgtgtttatattaattttaagtgattttagtaatatggattttttaattttttttgttgtaattttgggtcggttttgagggtgggatgggagaattcgtgtgatggatttgattttaagtattgggcggttttgttagagttcgtttttttttttttttcgtgtttttttttagggatagttcgtgtataatttttgtagtgtttagtagagggagttttagttatagtttcgatatagagttaggtggggttaggagggagtataagttatttgtttttttagatagaaaatagtgtggaggaggaggtaaggtttttgaggggagttttttgggtttgttgggtataaaggtgaaagttggtgttattttggggtagtttaaattaggtttatttaatttttttggtttttgttttgggggaataggaaaggaagtatgaggggagattttgagagaatgaaaaaaataatgtgatttttataaaagcgtagcgaggaagaaggtgttgttgttcgtttttttttttaaattttagttttgattttatttcgggttttttagtttttcgggaatgagggtggggtggggcgggatggggtggagaattatcgggagcgggtcgggtcggtcggcgcggtgggtgatttcgggatgttgggatttagggtgagggcggggtgagatggggagcggaattcggatttcgcgatttagttcggttcggtagtttgggttgtatttttttttaatttttttttttttaatcgaggtgcggatttcgtatttaagattttttaattcgattttggaattaatgtggggggcggggggtatagttggttggtagttggatggggggataattttttcgtttttttttttttatgatttatttaggggaaggagggaagtttgtaaatgattttttaaatattagagatttttttaaatttgtttatttagttatttttttgttttattgtttagttgtcgaagagtttttaaggaaatggggttatattttttttcgtttacgcgttttatagtttatttatattttttttttaggttagtaaaaggaaaatgtcgttaatttttttagtttcggtaaagtttttttggggtgtgagagttcgggatgggatagggagttttagggtttttttgtcggagttttaaattattttcggtgtttttttgttttttagcgtttttttcgtattttcgttttttaatttttaggagtcggtttcgtttttttattttcggtttcgtttttttcgttttcgtgttttttcggtttatttaagtcgtcgtcgtaggtattggttgtagacggtttcgttttttttattcgtttcgggagtttagtagagcgagttataggggtgggggttgaggggcgggttatattttttttttttttttttagtatattcggaaagtaggtagtggcgtttaggggggtattattggagagtgggggttttcgttggtggggttagaaagggagaagaatttagaaagtataggggagagaaagtagagaaagtgattgggttaataaaattaggtgtgtatggggaggaggaggggttcggatattttaggttgttggttatagtagtcggttttttaagggttaatttttttagattttcgggaattttttggtgacgttaagggcggggatgttagggagataatggtggagggggagaggtttttggatttcgttttttagggaaaattatatttatttcgatttttatatatttttcgggaaatcgttcgttttttttttttattggaacgtaaagatttattttagaagattttagttttttagatttttaaaatttttagtttttaggttttacggggtttttttttcgtaattttgtttcgaaagttagttgtttagtgttgattgtttcggggttatgggatttgaaagaggatttagagcggggagtaagggtaggtagggtggtttgagttagaggaggggtttcgatttttagttttcgtttgggcggggtgttaacggggatatataggttggtagtggttagtggtttcgtttagtttcggtaggggttttttgcggttggttttcgttgtttcggtggttttgaggttagagggttaagataaggttttttcggttttttttgagttttttgtttatagtttttgggatttaggagtttaaattgtatggggttattttagggtttttattagattttggatagttttttttcgttttagtttttttttaagtttagaagatattttttttttttaaagtataagtatttattggtatatttgttataagataggttaaaggtttaagtttggttggtttttagtggttttgttgttttttatatattcgtttttattttatttggagtttttttttttgtagtttttattttttagaaatattgatatttttttattttacgcgtagatatatatttggggttatttttttataacgtagatttttagttagttatttttttagttttttaaatttaatcgtatgaaagtaagatatttttaatatatgggagaggcggagataaagatttacggttttttgagatagagatatatagattgatagaagaaaaaaagggaagaaaaagaagatatagagaaagatataagtgaaaaatttggagtttttaatgttttattttaggtttttttatttttattttgtttttatgtttcgggtttgggatgagtttttaagaagttgagtatttttttaggtttttttttttattgtttttaggtggtttttcgtttgttttttttttttatttttgtttgggcgttgggttcgggatgcgcggtttagggttggagtttgggttggggggtgtgcggtggggagggggggcggagagggttacggtagcgtagtttcgatgttatttttatttttttaatttggtttttagttttttcgtcggtttagtcgcgtcgtaagttcggattattcgcgagaagcgtaaatttttttttttttttttgtaaaaattttttttttttttagcgttggcgcgtcgtcgtttttttcgttcgttttttattttttttttattttttttttttttgtcgttttggaggatgaggcggggtagttggaagtaagagaaggggtgtcgggtttattgtatttttaggatttttaggatttttttttttttttgagggattttatattcgttacgttttttttcgcgtttcggttgaatacgttgttgttggtgagtattaaatttcggtttggatttttggatcggttgttttaaagaggtttcgataattagattgaggaaaatattgcggggtagggggagaagtttaatcgagaacgataatagtggaggtagggtagtcgtttttggttggtgttaattgagtattttgttattttgtggtttatttgtaggttttattttttggatggaatttgtagcggtcgggatagagttgcggtttggggtaaattaagttgggttgggggttttggaagaaggtgaggagtttatggagtataaaagtaaggagtagcggttgaggttttgggtgtagggtgtggtttacgaggttattaaggagttttgggattgaagtttttttttttagaatttcggttttacgtttcgaagttttggagggtgtcgttttttcgtattacgttattgtaggttttagttgtttttttaggttttttgttttttttgttggtcgtttttatatatgatattcgttcggagtcgaagtagaagagttggggaattgaaggaggagtttagttgaaggaggagttttttattaaagtttatttaaaagtttaggaggtggatatgtgagttttgagaaacggagaggtagaggttgttatgtttagcggtattgtttgatagggaagtgttttgtttttttagatttgtattgttatcgtgatcggatataagggaggggtagtattttagtttttgatttttatgagaaagaggaggaagtatgataaggaaaaagggtattttttttttttttttttaattttataggtagattttttatattttagttttgtttttaagaattatttttttgggtgtggaaggttagtgggttaattgtttagtttgagggttaagggggaaaagaaaaggtgaaggtagggggagatttgggattttgatttaggttagttatttttagaggggttagagatttagtttagttagattagattaatgggtattgaaaaaaaggtattttatatatgtttttgttttagtttcgagtttttttttttagaggagttatttatgtatttatgtatttatttatttttatttgggacggggttttattatttgtttaggttggagtgtagaggttatttataagtgtgattatagtttcgaatttttgggtttaagcggtttttcggttttagttttttaagtagttgggattatcggtgtttagtaagaagagtttttttagaatattttatttttttttttttatttagttttatagattagtgagttttaaattttttggttttttttatatttttaaaagttattaggttaggtatagtggtttagatttgtaattttagtattttgggaggttaaggtaggcggattattttaagttaggagttcgagattagtttggttaatatggtgaaattttatttttattaaaaatataaaaaatagttgggtatggtggcgtaggtttgtagttttagttatttaggaggttgaggtaggagaatcgtttgaatttgggaggtggaggttgtagtgagtcgagattgtgttattgtattttagtttgggcgatagagcgagatttcgttttaaaaaaaaaaaaattattgagtttttgtttatatgatttatatttattaatttattatattagaaattaaaattgaaaaagattgtaatataagattatataagtatatattttattaataatgatgttagaaagatgatgtaattatatgttatacggtttttggaaaattttataatataattttaagataatgagaatttaaaaggtaaataatatgttagtattattatgaaaatagttttgattttgtggatatttttgaaaagggattttttagaagtttatagagtatatttgaagaattgttgttttggattattattttaatttttttttatgatttatatttgttgatttttttttttttttttattaagaaagtataagttaggcgcggtggtttacgtttataattttattatttcgggaggttaagtcgggtggattaagaggttaagagattgagattattttggttaatatgttgaaatttcgtttttattaagaatataaaaattagtgggcgtttgtaattttagttgttcgggaggttgaggtagaagaattatttgaatttaggagacggaggttgtagtgagttaagatcgtgttattgtattttagtttggtgatagagcgagattcgattttaaaaaaataaaaaagaagaaagaaagtataaatgtttgttttttagtgggttttgttttttgggaaaaattagggaattttttaggtttagtgttttatttttttgatttttgtttttgggggttttttaagtatttttttttagcgttttgtttattttttttttgatttttttttaaggtattttaatagtttttattttgggttagtttgtttattttgttttaagtttgttggattatttatttgtttttttttttttttatttgaggatttttttattttgggagaggttaagtaatttttttttgttttttttttttttttttttagtttttgatatttttttataggatttagggtaggaaattatgttttttgggtagatttttttagaagaaacgttttatttattttttaatatattagttaatttggaataagttagagttttagataagaaagtgtttatttgggttttataggggttaagtgagttatattgttaggtggttgttgggttggggtgtggattaggaatttgatgtttttagttatagatgttttgtgtttgggaaattttattttggtttttttattttaaagttttaggtttttttgttagttgtagttataggtttttattattatatttggtatattcgttttgattatattgttattatgatttaggtagaggagagagaggggttttcgggtagtagggatataataggaggtattggtaggttaaggattgttggttttgaggaggttgaagacggtagaatggaaagaggtagtaatgtttgggttgttagttaggtggggagggtattgtttattgtagtaatttagttggtatttttcgggttgtagtatttagtttcgttattttagtttttggaagtttacgtaatggtttcgtttgtaatataagggggtcgtaggtttataggtgggggttttttttttggttcggtttgttttaggtttattggttcggattttaagttttaggaagggttgttggtgttttgttgtgtttaagagtcgtttcggttgtttagtaattgtgttgttgttttttaggggtttgtagtttagttgtagttttaggatattagattttttattttttaagttattagagggtagagttaaggtatgttagtttaggttggtgatgtggtgtttagttaggagagtgcgggatttttggcgttttttttttggtttttatcggaagatttttaagtaaagagtgttaggaagggtggggagtacgtgtagttataggcgggtatggtataggtggtgggatcgaggagtggataggtgaaaagtgagtagggagttgtaggttgaagtggagtttgttcgaaagatagaaaagggaaagaaaatgtgagtagagatgaagtttttttttgagattttttaagttttgtttattgttttttttcgaatttatttttagaaaagtagagattgttttgtgttttttgtaattagtttttgttttagttttttttttttttgttatattttattttttttgttgtttttgttaggttttttttttgtttttttttttttgtttgttttttgtttgttgtttttttttttatttatttgtgatagtagtaaagttgatgattttttttttattttttggagttatattttttggttgtagttttcggagggttttggttagcgttgtttggggtggaggatgagttattttgggacgattggttaggtgtaatttatttaggatttgttgtttggttagttttagtattagagttcgttttgtttggggtgttagtttggagtttttataggagggatatatagattttgttttttgtgttcgtattagtgtttatagtagtattagttagagttggatattagggagtcgtatgtttttggtgaatggttttggtttaggagtttcggatggtagttgtttcgtttgttgagtttgattgttgggggttaatgagggtatagtgatagtagatattattgttatatttatttttggttaagggtatagttatttgttttttattgtttgggatttaggaaggttgaaagtagattatttgatggatagttgtgtttgatttttatagtttatgtttggttattgatttggggtttttttagagttagttgtttgggttttttaaatttagtggttagttagtcgatttattttttgagttttaggattggttagttgtgttgtttattaggtttttgtagggggtggaggtttttttttttattagtttaggttttattatttg

SEQ ID NO: 63 - DNA, 5327 bp, Artificial Sequence
  chemically treated genomic DNA (Homo sapiens)
aaggtaaataattaaaaaataaataaattttttttttttaaaaaagaaaaaaaattgtagtttttaaattagatttaatggtatagatttgtaattttataattttaggtatttagagtaaaggtagaaggatcgtttgagtttagtagtttgaggtagtaatgttttgtgattgtgtttgtgaataattattgtattttagttcggaaaatagtattagatttttgttttttttttttgtttgttttttttttttgttttttgtttgtttttttttttgtttgtttgagataaatgatttttatgttttagtttttcgagtagttgggattataggggcgtattattatatttggttaatttttgtatttttagtagacggggttttgttatgttggttaggttgattttaagtaatttatttgttttttaaagtgttggggttataggtatgcgttatcgtatttagttaagataaaattgtagtttttgttaatgatttgttagttattgtaaattataaaaggttatgtattgttttatagtataaattaattttaaatttaaaagttaaaaaaaaaaaaaggagtttattcgagcggaatttatttataatttttgaggttttatgaggaagatcgaggattttaaaaggtatttgtggttttgtggtatttttttgatattttttcgggagttttagaagttattagtagtgttttttaggtttttttgttagttgttagaattgttaaaagataaaattataatgaatttagtttataaattttttttttttttttttttgagatagagttttttttcgtcgtttaggttagtatgtagtggcgcgattttagtttattgtaatttttattttttaggtttaagcgatttttttgttttagttttttaagtagttgggattataggtgtatattattatgtttagttaatttttgtattttagtagagatggggttttattatattggttaggttggttttgaatttttgattttaagtgatttgttcgtttcggttttttaaagtgttgggattataggcgtgagttatcgtatacgttttttagaaatttttttttttttgttttttgagatagagtttcgtttttgttgtttaggttggagtgtaatggtacgatttcggtttattgtaatttttgtttttcgggtttaagtaatttttttgttttagttttttgagtagttgggattataggtatgcgtattatgtttagttaattttgtatttttagtagagagggggttttttatgttggttaggttggtttcgaattttcgattttaggtgattcgtttatttcggttttttaaagtgttgggattataggtttgagttattgcgttcggttttagtttttataaattttaattggtttttattttttattttagaatcgggtaatattttattttatagagtgagtgttttgatgagttgagtaaaggaggttgggtttgtagatagaaaagggttaaggaaagtagaaatagagaatataaagtagattggttgttttaggtattttttttataaaggttaaagtaaaggggttttttttattttgttagttaatattagtttgtttgaggatttggttattatttgttttttttgattatttagaaggttaaataaatttagttttagtttggttttgtggaaggtgagtaattgtattttggtttggttttttgggtatagtagaagagtttagtttaaattaatggttttttataatttaattttatttatttatttatttttgagatagggttttattttgttatgaggatggtaggtgttattttggagtgttggagtgtagtggtgcggttttagtttattgaagttttaattttgtgggtttcggttttagggttagtttgtgttgtgagagagcgtgtgattttttgggattataggtaggtgttattacgtttagttaattttttgtatttttagtagatacgggatgtcgttaggttgtttaggttgttttttattatttatatttttgattataaagtataggatttttgtttatttaggtttttaatttatttagatttttatgttatagatgatgattgttgttattaagaaaatgagggtaagagtaaatataggtagagtttttaatatattagtaatttgttatttgtagtgatgatttgttaggaagggttaatttatttttttttttgaaagggaggtttacgaaaagaaaaataggttaggtgtggtggtttatgtttgtaattttaagtattttgggaggttgaggtaggaggattatttgaattcgggaggttaaggttagtgtgagttatatttttattattgtattttagttcgggtaaaagagtaaaattttgtttttatataaataagtaattttaggatttttaaattttgtagatgaagaaattttttttttttttttggttggggtggggaagattagtttgttttttgttttttttgggaagttataggattattgatgaataaaattattgtttagggaagagatatttagtggtttttatgtttaggtttatttttaggaattatatttttagaggggttttaatttttgaggttttaattggtttttttttaggtatttaagaataaattacgaataagtagtgggaaataaaaattagtttgattttagtatttgtttttattttaaagggaggtgagggttgttggtattggtgggttttgggtttagtttttagttagaggatgtggggattttttttgggggtttgttttttttatatttttttttttagttaggttgttttggatatttttgggatttttttgagggattatggtttttgttttggggtttttttttgttattttaatattgaggtattttagtttttttttttggaagatggagtatttgtattgttgtttttttttttgtttttgtttttgtataaaaatgataatatttttcgtcggattgtattttagtttaaaaaataaaattaaatttttttttttttgatattttaggtttatagagttaagtttattaattttttttttgttttttgttttttggttggggaaagggttttttaagaaatattgaattttttttatttaaaagtagtttaggttaaataagttaaattttaaatgtaatatttattgttttaaaatattttagtaaagaaaataaggtttggaagatggtggtaggggatagatgaaataagattgaaaagtgttgataatttatgaagttttggaaatttattttgtttttttgtttgatattttttatagtaaggagtttttaaaaatattagtttttttttattttttattttaataatttttttttgtttgtttttgataagttttggtttaggaggagaaaagttgtataattagtttttgtgtatgtgtgtgtaaatttttgtgtgtttatttgtgaatatagttttattaggggagggtttatttttgttatgtattattagtatataataaatatatatgtttttttttatttttttagagatagggttttattttgttatttaggttggagtttagtggtggtaattatagtttattatagtttttattttttgggttgaagtaatcggttttttaagtagttgggattataggtttacgttattatatttagttttatttattttttgtatagacggggtttttttatgttgtttaggttggtttggaatttttgggttttagtgatttttttattttagttttttaaagcgttgggattataggtatgagttattacgttaggtttatattttattttaaaataacgaagttttttttttttatatattttaaattcggggggtattaaatttttgatattattttaacgatttttttataattaaggtattataattttttttagaaagggttttttagttatttatattacgggtttcggtggtatagcgtagggtagtatagatttgtgttatagttttcggttttatttagagtaggatggttttaatttaatttttttgtttgtttgtttggagatggcgttttattttgtcgtttaggttgtagtgcggtggtacgattttggtttattgtaattttcgttttttgggtttaagcgatttttttgttttagttttttgagtagttgggattacgggtattcgttattatattcggttaatttttgtgtttttagtagagatatagttttattatgttggttaggttggttttgaattgttgattttaggtgattcgttttatttcggtttattaaagtgttgggattataggcgggagttatcgcgttcgatttaattttttgtattttagtagagacgggattttatcgtgttgtttaggttggtttcgaatttttgattttaggtagtttattcgtttttgtttgttaaagtgttaggattataagaatgagttattacgaatgagttattgcgttaggtttttagttttatttattttgggttttagtttttatcgtttgaaaaaagagtagttcgattgtatttattttttcgggtttcgtttaaattatgggtagtttcgtttaaattatgggtagtttcgtttaaattatgggtagtttcgtttaaattatgggtagtttcgtttaaattatgggtagtttcgtttaaattatgggtagtttcgtttaaattatgggtagtttcgtttaaattatgggtagtttcgtttaaattatgggtagtttcgtttaaattatgggtagtttcgtttaaattatgggtagtttcgtttaagggcggagattgggcggagcgtcgcgtttttttttattttttttcgattttcggaggttttttatttagtgttcgcggcgtatgtgttaggtatattttatttttaatcggttttggattttattttcgttttattatcgttgttggagtagttgtttttaggttttgcgtcgttttcggagtttatggtcggtacgcgttgggtattcggggcgttgtttcggggttgcggttgtaattgtagtagttgtcggcgtatcggcgtcgtttgtttgtttttttatttcgtcgttggttttatttcgtcgggcgtttcgggtcgtcgtcgtttgttgttgttgttcggggtcgtcgcggtcgttgttttttagacgcgtggtttttagatcgggtttgtgtttttcgggaggttggcggggtttttcgttgtggttatttttgtcgcggtcgcggtcgtcg

SEQ ID NO: 64 - DNA, 5327 bp, Artificial Sequence
  chemically treated genomic DNA (Homo sapiens)
cggcggtcgcggtcgcggtagaggtggttatagcgggaggtttcgttagtttttcgggaggtataggttcggtttggaggttacgcgtttgggaggtagcggtcgcggcggtttcgagtagtagtagtaggcggcggcggttcgagacgttcgacgggatagagttagcggcggagtagaagggtaggtaggcggcgtcggtgcgtcggtagttgttgtagttatagtcgtagtttcggagtagcgtttcgagtatttagcgcgtgtcggttatggatttcggaggcggcgtagggtttgaaggtagttgttttagtagcgatggtggaacggaagtggaatttagggtcggttgggggtggggtgtgtttggtatatgcgtcgcgggtattgggtggggggttttcgagagtcggaaggaggtggaggagagcgcgacgtttcgtttagttttcgtttttgggcggggttgtttatggtttgggcggggttgtttatggtttgggcggggttgtttatggtttgggcggggttgtttatggtttgggcggggttgtttatggtttgggcggggttgtttatggtttgggcggggttgtttatggtttgggcggggttgtttatggtttgggcggggttgtttatggtttgggcggggttgtttatggtttgggcggggttgtttatggtttgggcggggttcggggaagtgggtgtaatcgaattgttttttttttaggcggtggaaattgaggtttaaagtaagtgaggttaggggtttggcgtagtgatttattcgtagtgatttatttttgtaattttagtattttggtaggtagaggcgggtggattgtttgaggttaggagttcgagattaatttaggtaatacggtgaaatttcgtttttattaaaatataaaaaattaggtcggacgcggtggttttcgtttgtaattttagtattttagtaggtcgaggtagggcggattatttgaggttagtagtttaagattagtttggttaatatggtgaaattgtgtttttattaaaaatataaaaattagtcgggtgtggtgacgggtgttcgtaattttagttatttaggaggttgaggtaggagaatcgtttgaatttaggaggcggaggttgtagtgagttaagatcgtgttatcgtattgtagtttgggcgatagagtgagacgttatttttaaataaataaataaaaaaattaggttagggttattttgttttgggtagggtcgagagttgtagtataagtttgtgttgttttgcgttgtgttatcgaaattcgtggtgtgagtggttaaagaattttttttgaaaggaattgtgatattttggttataaaaaaatcgttgggataatattagagatttggtatttttcgaatttgaggtatgtgaggaaggagaatttcgttgttttaaaatgaaatataggtttggcgtggtggtttatgtttataattttagcgttttgggaggttgaagtgagaggattattggagtttaagagttttagattagtttgggtaatatagggagatttcgtttatataaaaaataaataaagttgggtgtgatggcgtgggtttgtagttttagttatttgggaggtcgattgttttagtttagaaggtagaggttgtggtaagttatgattgttattattgaattttagtttgggtgatagagtgaaattttgtttttaaaaaaataaaagaaaatatatatatttattatgtattgataatatataataaaggtgaatttttttttaatgaaattgtatttataagtgaatatatagagatttgtatatatatatataaagattggttgtgtagtttttttttttttgagttaggatttgttaaagataagtaaaaggaagttgttagagtaaaaaataagagaaagttagtatttttaaaaattttttattgtggaaaatgttaaatagaagagtagaatgaatttttagaattttataaattgttaatattttttagttttgttttatttattttttattattattttttagattttattttttttgttagaatattttaaagtaatgggtattatatttaaagtttgatttgtttaatttggattatttttaggtaaggaaaatttagtattttttagaaaattttttttttaattaaaaaataaagaataagaaaaaaattgataggtttggttttatgaatttggagtattaaagaaaaaggggtttagttttgttttttgggttaaaatatagttcgacggagagtattgttatttttatataaaaatagggataaaagaaaaggtaatagtgtaaatattttattttttaggaagggaggttgggatgttttagtgttaaaatgataaaagaaaattttagagtaagaattatgattttttagaggagttttagaaatgtttaagatagtttggttgggagagggggtgtgggaagggtaggtttttaagagaggtttttatattttttggttagaggttaggtttaggatttattaatgttagtagtttttatttttttttggggtgagagtaggtgttgaggttaggttggtttttgttttttattgtttgttcgtgatttgtttttggatatttggaaaggggttagttgaggttttaggggttgaggtttttttggaaatgtggtttttgggaatgggtttggatatagaagttattggatgttttttttttgaatagtaattttgtttattagtaattttgtaattttttaaggaaaataaagaataggttagttttttttattttagttaaaaaagagaagggggtttttttatttgtaagatttgggaattttagagttatttatttatatagagatagggttttgtttttttgttcgagttggggtgtagtggtgggaatatgatttatattagttttgatttttcgggtttaagtaatttttttgttttagttttttaaagtgtttgggattataagtatgaattattatatttgatttattttttttttcgtaagttttttttttaagaaggaaaatgggttagttttttttaatagattattattataaataataggttgttgatgtattggagattttgtttatatttatttttgtttttatttttttaatagtagtagttattatttataatataaaaatttgaatggattggaaatttaaatagatagaaattttgtattttataattaggagtataaataataagaggtagtttgggtaatttggcgatatttcgtatttattaaaaatataaaaaattagttgggcgtggtgatatttgtttgtagttttaaaaggttatacgtttttttatagtataaattgattttaaaatcggagtttataaggttgaggttttagtgagttgagatcgtattattgtattttagtattttaaagtagtatttgttatttttatgatagagtgagattttgttttaaaagtaaataaataaataaaattaaattataagaggttattggtttggattgagtttttttattatgtttaaaagattaaattaaaatgtagttatttattttttataagattaagttgaaattaagtttatttgattttttgagtaattaggagagatagataatggttaaatttttaaatagattggtgttagttggtaggataaggaaggtttttttgttttgatttttatagggaaaatatttgaaataattaatttgttttgtattttttgtttttattttttttggtttttttttatttataaatttaattttttttgtttagtttattaaaatatttattttatagaatgagatgttgttcgattttagaatagaaaataaaagttaattaagatttataaaagttgaggtcgggcgtagtggtttaagtttgtaattttagtattttgggaagtcgaggtgggcggattatttgaagtcgggagttcgagattagtttgattaatatggagaattttttttttattaaaaatataaaattagttgagtatggtgcgtatgtttgtaattttagttatttaggaggttgaggtaggagaattgtttgaattcgggaggtagaggttgtagtgagtcgagatcgtgttattgtattttagtttgggtaataagagcgaaattttgttttaaaaaataaaaaaaaaaaaatttttaaaaggcgtgtgcggtggtttacgtttataattttaatattttggaaggtcgaggcgggtagattatttgaggttaggagtttaagattagtttggttaatatggtgaaattttatttttattaaaatataaaaattagttgggtatggtggtgtatatttgtaattttagttatttgggaggttgaggtaagagaatcgtttgaatttgggaggtggaggttgtagtgagttgagatcgcgttattgtatgttagtttgggcgacggagagagattttgttttaaaaaaaaaaaaaaaaaagatttgtaaattaaatttattgtaattttgttttttgatagttttggtaattgataaagggatttaaaggatattgttgatgatttttgagattttcggaggaatattagagaggtgttatagagttatagatgttttttgaggttttcggttttttttatggagttttaagggttataggtaagtttcgttcgggtggatttttttttttttttttggtttttgaatttaggattagtttatgttgtgagatagtgtatgattttttgtggtttgtagtggttgataagttattggtaagagttgtagttttgttttggttgggtgcggtggcgtatgtttgtaattttagtattttgagaggtaggtggattgtttgagattagtttggttaatatagtaaaatttcgtttattaaaaatataaaaattagttaagtgtggtggtgcgtttttataattttagttattcgggaggttgaggtataggaattatttgttttaaataaataaagaaagaaataagtagaaaataaaaagaaaaaataaataaaaagaagagataggggtttgatgttatttttcgggttggagtgtagtggttatttataagtataattataggatattattgttttaaattattgggtttaagcgatttttttgtttttgttttgagtgtttgggattataggattataggtttgtgttattaagtttggtttaagagttgtagtttttttttttttttggggggggggggtttgtttgttttttagttgtttatttt

SEQ ID NO: 65 - DNA, 5999 bp, Artificial Sequence
  chemically treated genomic DNA (Homo sapiens)
acgtttcggcgtggtcgtagggcgcggcggaatgattttcggggcgtttttaaagcggcggagaggagtgtcgggttgagttttcggttgagagtttttttagcggcgtcggtgagttcgcgtgtggaagtttgtgaggcgtagaggtggggtaggtcgtttgattagttaggcggttgggagcgttttcgtggcggggaacggaggttgaattgttttgtttgggtttatagggaaggaggatgtgaaggagtttgtgaaggtagaggaaggtaattttcgtttggggagtcgtagagtagggagggaagttgtaggtcgtttttttttaagtaaaagcgcgatttttagaaatgatggtttagggttcgagtttgtgattcgtttgagaaagtgattaatttttgagtttgaattttatatttgaaaaataaggatagtaattatttttgttagttttatatagtttggtaaggtgtgaagaaaagttttttaaattgggatgtttggtgtttttatttgttggtagatagtatttcgagtttatgtaacgggaattatattagtaggtttatgttgaggaacgtggattgtttggggttggattttaggaaatagattatttaaaaaaattttttttttttcgagacggagtttcgttttgtcgttaggttggagtgtagcggcgcgatttcggtttattgtaatttttatttttcgagtttaagcgattttttttttttagtttttcgagtagttggaattataggcgcgtgttattacgtttagttaatttttgtatttttagtagagacggggttttattatgttggttaggatggttttgattttttgatttcgtgattttttcgtttcggttttttatagtgttgggattataggtgtgagttatttatttggtttcggtgatatttttaagaagaaaatggattgttgggaagtgataggttattggagatttttataaagtttatttttaggatgtatgaattttttaaatagtatgtatgtttataattagattttttattgaacgtttgtagttttagggattttaatattttttgtttagtcggattttttattgtaggtagttttaattaagaagtttttttagtcgggcgtggtgatttatgtttgtaattttaatattttggaggatcgaggtgggcggattagttgtggttaggaattcgagattaggtttggttaataggttggtgaaatttcgtttttattaaaaataaaaaggttagttgtggtggcgtgtgttttaattttagttattcgggagatagaagagatagtagaatcgtttgaattttggaggcggaggttgtagtgagtcgagattgcgttattgtattttaagtttgggcgatagagtaagatttttgttttaaaaaaaaaaaaaaaagaatttttttgatatggttagttaaaagttttttagttgttatttatttttatatttataatatttattatatatttgtaattattttatttattttgagatagggttttattttgttatttagtttggagtgtagtagtgaatatagtagtttcgatttttttgggtttaagttatttttttatttttgttttttaagtagttgggatttaagtattcgttatttcgtttagttaattttttgatgttttgtagagataaggttattgtttaggttgatttgagcgtttgaatttaagtaatttttttgttttggttttttaaagtgttgggattataggtttgagttattgtgttttgcgaagaatttgagtttaaaaacgttgagaacgttatgcgagttttttatttttaaagtttataatacgtaatagaaaatagggaggagtaaaatgtttagttgaggttgggtgtggtgatttacgtttgtaattttagtattttgggaggtcgaggtgagtgggttatttgaggttaggagttcgagattagtttggttattatggtaaaattttatttttattaaaaatataaaagttagttaggtgtggtggtgggtttttgtaattttagttattcgggaggttgaggtaggaggattatttgaattcggaggcggaggttgtagtgagtcgagatcgcgttattgtattttagtttgggtggtgagtgaaatttcgttttaaaataaaaaaagaaataaaaatattttgtttataggtagattatttgaggttaggagtttgagattagtttggtaagttaggcgaaattttggttttataaaaatataaaacgtggtaaaattttgattgtattaaaaatataaaaattagttgggtatggtggtacgcgtttgtaattttagttttttgggaggttgtaggataggagaattatttgaattcgggagatggaggttgtagtgagttacgaggtggtggagttgggagggagattgtattggggaggatggaggtgtgatgaggatatttatttgtgtatgaatgaatgaatgatagagtttcgtttttttatttaggttggagtgtagtggtataattttggttcgttttagtgtttatttgttaggtttaagtgatttttttgttttagtttttcgagtagttgggattataggtgtgtattattaggttttgttgatttttgtatttttagtggagacggtattttattatgttggttagtttggttttgaatttttgatttgaaatgatttgttggtttcggttttttaaagtgttgggattataggatgagttatcgtgttcgttttttttttttttttttttttttttttttttttttttttttgaggtagggttttattttgttgtttaggttggagtgtagtgatttgatttcggtttattgtagttttcgtgttttttgggtttaagtagtttttttgttttagtttttttagtagttgggattataggggttcgtttttattaattttttagttaatttttaaatttttgattttaagtgattatttgttttagttttttaaagtgttagaattatagatgttagttattatatttggtttggtttttttttttttttttttttgagacggagttttgttttgttatttaggttggagtgaagtggcgtgattttggtttattgtagtttttgttttttaggtttaaggaatttttttgttttagtttttttagtagttgggattataggtatttgttattatgtttaattaatttatgtatttttagtagagacgggtgttgttatgttggtttgattggtttcgaatttttgattttaggtgattcgtattttgtttttttaaaagtgtagggattatagggatggagtcgttgtatttggttttggtttgtgtttgtttgttttgttttgtttttaatttttatttttacggagtacgtgtgtatgttggttatatggataaattgtttgttgttgaggtttggtatataaatgatttcgttattttggtagtaaatatagtattcgataggtagttttttaatttttatttttttttatttttttttgtttaatagtttttaatgtttgttgtttttatcgttatgtttacgtgtatttagtgtttagtttttattcgtaaatgagaatatgtcgtttttggttttttgttgttgtttttttttaggttagagtgtagtggtacgatttcggtttattgtaatttttttgtttttcgggtttaagtaatttttttgttttagttttttgagtagatgggattataggtgttcgttattatatttggttaatttttttttatttttagtagagatagggttttattatgttggttaggttggttttaaatttttgattttaggtgatttatttgttttggttttttaagtgttaggattataggcgtgagttattgcgttgggtttttgttcgtgttaatttaatgaggataatggtttttagttgtatttatgttgttgtaaaagataggattttattgtgttttttttttcgttgtttttttggttgttagtattttatgatatattacgtattatattttttttatttagtttattatttatgagtatttaagttgatttgatgtttttgttattttggatagtgttgtgattaatatgagtgtttttgtatttttggtagaatggttttatttttttttgggtttatatttagtattgggattgttggatcgatatatatgtgtttaataaatatatgaaaaaatgtttaatattattgattattagagaaatgtaaattaaaattataatgtaaattaaaattataaatttattttattattagttagaatggatattattaaaaagttaaaaaataatagatgttggtaaggttgtgaagaaaagggaatgtttatttattgttggtaggaatgtaaattagtttagttattatggaaagtagtttggagatgttttaaagaattatgtttaattttgtgttttttttttttgaattatgagttatagtatttatttatttataaataataaatgtgatttaaaaatttttgattatgagaaaattgagatatatatagagagatagtataatgaattatatgttatttagttataatagtttaattacgtttatattgattttttataagtttatagtttgttatgtgatatatttataaagtatttttgtttttttataaatcgtaaaaagacgtttatttttattggtattaagtttgtgtataagtttatattattttttggaaatgagaaatggagttttatgaagatttttaagataattattgagtaaaatataaagaataagatgatttggtattttatttttttttattttatatatgtgtttaatttttaaatttaattggatgaattttgtaataaatatttttagataatttatattttaatggtttttatagattattgaataataaaatatagttttgaaaaaaatggatgaagaatttgaaagaattaagcgatgggaaggaggttatgaaagaatatggtaaggagagttttattgttttgtttttttttttagataatgtttttttttttttttataattttattaaagtatattttatatatgttaaaatttatttatttttaatgtataatttagtgatgttttattaataatttattgagttgtgtagttattattataaattagttttagaatattgtaattattttagtaagattttttatatttatttataattaatttaaattttaatttaattttatttgtgggtaattattagtttattttttgtttttaaattttaattttttttggatattttataaaaatgtgattatatataattatgtgttatataatgatgttttggttaaagatagattgtatatatgataatggttttataatattataatattgtatttttattttattttttttatgtatgtttagatatataaatattgattattgtgttatagttgttttaagatatttagtatagtaacgtgttgtataggtttgtaatttaggcgtgggataggttatattatttaggtttgtgtaagtatattttgtgatatttatataataatgaaattgtttaataatgtattttttagaatgtatttttgttagtaagcgatgtatgattataatagttggtttgttgtggttggtttttatttatttttaagatttatttatgatgtagtgtgtattaatattttattttttttttattgttgaatagtatttttatttatggttatgttatattattgtttatttatttattagtttgtggatatttaggttttttatagtttttgattgttaggaaaatgtagttatgaatatttatatgtaaatttttgtgtggatatatatttttattttatttgggttagtaattattttagtttgtttttttaaataaataattatgatttatagg

SEQ ID NO: 66 - DNA, 5999 bp, Artificial Sequence
  chemically treated genomic DNA (Homo sapiens)
tttataagttataattatttgtttgaaaagataagttaaaatgattattagtttaaatgaaatgaaaatatatgtttatataaagatttgtatgtaagtgtttatggttgtatttttttaatagttaaaaattgtaaagaatttaaatatttatagattagtgaatggataaataataatgtggtataattatagatgggaatattatttagtaataaaaaaggaatgaagtattaatatatattgtattatggatgagttttaaaaataagtgaaagttagttataatagattaattattatagttatgtatcgtttattgatagggatatattttgagaaatgtattgttaggtaattttattattgtgtgaatattatagggtatatttatataaatttagatggtatagtttattttacgtttaggttataaatttgtatagtacgttattatattgaatattttaagataattgtaatataatggttagtatttgtatatttaaatatatatagaaaaggtagagtaaaaatatagtattataatattatgggattattgttatatatgtagtttgtttttgattaaaatattattatgtggtatatgattgtatatgattatatttttgtgaaatgtttagaaaaggttaaaatttggagataaaaagtagattaatgattgtttataggtggaattaaattaagatttaaattaattgtaaatgaatgtgaaggattttattggagtggttataatattttaaaattggtttatgataatggttgtatagtttagtaaattattaataaaatattattgaattgtatattggaaatgggtgaattttaatatatgtaaaatatattttaataaagttgtaaagaaaaaaaaagatattgtttaaaagaaaagatagggtaataaagttttttttattatgtttttttatagttttttttttatcgtttagtttttttaggttttttatttattttttttaaaattgtattttattatttaataatttgtaaaaattattagaatgtaagttatttaaagatgtttgttataaaatttatttaattaaatttgaaaattagatatatatataaagtaaaaaaaaatggaatgttaggttattttattttttgtattttatttaataattgttttaaaaatttttatagaattttattttttatttttaagaaataatatgaatttatatataaatttggtattaataaaaataagcgtttttttacgatttgtaaaagaataaaaatgttttatagatgtgttatatgataaattgtagatttgtgaggagttagtatgggcgtagttgaattattatagttgagtgatatgtgatttattgtattatttttttgtgtatgttttaatttttttataattaaaagtttttaaattatatttattatttataaatgggtaaatgttatagtttataatttaaaaaaaaaggatataaaattaaatatagttttttgagatatttttaaattgttttttatagtggttgaattaatttatatttttattaatagtggataagtatttttttttttttataattttgttaatatttgttattttttgattttttaataatatttattttaattggtggtgagatgggtttgtggttttgatttatattgtggttttggtttgtatttttttaatgattagtgatgttgaatatttttttatatatttattggatatatgtatgtcgatttaataattttaatattgggtataaatttaaaggaaaataaaattattttattaaaagtataagagtatttatattaattatagtattatttaaaatagtaaagatattaaattaatttagatgtttataaatggtggattggataaagaaaatgtggtacgtaatatattatggaatattagtagttaaaaaaataacgaaaaaaaaaatataatgaaattttgttttttgtagtaatatggatatagttggaggttattatttttattgaattaatacgaatagaggtttaacgtaatggtttacgtttgtaattttagtatttgggaggttaaggtaagtggattatttgaggttaggagtttgaaattagtttggttaatatggtgaaattttgtttttattaaaaatagaaaaaaattagttagatgtggtggcgagtatttgtaattttatttatttaggaggttgaggtaggagaattgtttgaattcggaaggtagagaggttgtagtgagtcgagatcgtgttattgtattttggtttaaaaaaaaatagtaatagaaaattaaagacggtatgtttttatttacgagtggaaattaaatattgagtatacgtggatataacgatgagaataatagatattggagattattagatagggaaggatgggagagagtgagggttgaaaaattgtttatcgggtattatgtttattattagggtgacgggattatttgtatattaaattttaataataagtaatttatttatgtaattaatatgtatacgtatttcgtgaaaataaaagttgaaaataaaataaaataaataaatataggttagggttaggtgtagcggttttatttttgtaatttttgtatttttgagaggataaggtgcggattatttgaggttaggagttcgagattagttaggttaatatggtaatattcgtttttattaaaaatatataaattagttgggtatggtggtaggtgtttgtaattttagttattagggaggttgaggtaggagaattttttgaatttggagggtagaagttgtaatgagttaaggttacgttattttattttagtttgggtgatagagtaagatttcgttttaaaaaaaaaaaaaaaaaaaaattaggttaggtatgatggttgatatttgtaattttagtattttgggagattaaggtaggtgattatttgaggttaggagtttgaaaattagttaggaggttggtgggagcgggtttttgtaattttagttattggggaggttgagataagaggattgtttgaatttaggaggtacggaggttgtagtgagtcgagattaggttattgtattttagtttgggtaatagaatgagattttgttttaaaaaagaaagaaaagaaaggaaagaaagagagagagagaaacgggtacggtggtttattttgtaattttagtattttgggaggtcgaggttagtagattattttaggttaggagtttaagattaggttggttaatatagtgaaatgtcgtttttattagaaatataaaaattagtagggtttagtggtgtatatttgtaattttagttattcgggaggttgaggtaggagaattatttgaatttggtaggtagatattggagcgagttaaggttgtgttattgtattttagtttgggtgagagagcgagattttgttatttatttatttatgtataaataaatgtttttattatatttttattttttttaatgtaattttttttttaattttattatttcgtggtttattgtaatttttatttttcgggtttaagtgatttttttgttttatagttttttaaggagttgggattgtaggcgcgtgttattatgtttagttaatttttgtatttttagtatagttagggttttgttacgttttatatttttgtagagttagggtttcgtttgatttgttaggttgattttaaatttttgattttaagtgatttgtttgtaaatagaatatttttgtttttttttttgttttaaggcggagttttatttattatttaggttggagtgtaatggcgcgatttcggtttattgtaattttcgttttcgagtttaagtgatttttttgttttagtttttcgagtagttgggattataagagtttattattatatttggttaatttttgtgtttttagtagaaatggggttttgttatggtggttaggttggtttcgaatttttgattttaggtgatttatttatttcggttttttaaagtgttgggattataggcgtgagttattatatttagttttaattgaatattttgtttttttttgttttttgttacgtattgtgaattttaaaaatgaaaaattcgtataacgtttttaacgtttttaaatttaaatttttcgtagggtatagtggtttaaatttgtaattttagtattttgagaggttaaggtaaaaggattgtttgagtttaggcgtttagattagtttgggtaataattttgtttttataaaatattaaaaaattagttgggcgaggtggcgagtatttgagttttagttatttgggaagtaaaagtgggaggatggtttgagtttaggagagtcgaggttattatgtttattattgtattttagattgggtgatagagtgagattttattttaaaataaataaaataattataaatatataataaatattataaatataaaagtaaatagtaattgagagatttttggttgattatattaaaggaatttttttttttttttttttgagataagagttttgttttgtcgtttaagtttggagtgtagtgacgtaatttcggtttattgtaattttcgtttttagggtttaagcgattttattgttttttttgtttttcgaatagttgagattaaggtatacgttattatagttaatttttttatttttagtagagacggggttttattagtttgttggttaggtttggtttcgaatttttgattataattggttcgtttatttcggttttttaaagtgttgggattataggtatgagttattacgttcggttaaaaggattttttaattagagttgtttgtaatgggaaattcgattggataggaggtattaaggtttttaaaattgtagacgtttaatgggaagtttgattgtaaatatgtatgttgtttaaaggatttatgtattttgaagatggattttgtaaagatttttaatggtttgttattttttaatagtttattttttttttaaaaatattatcgaggttaggtgggtggtttatatttgtaattttagtattgtgggaggtcgaggcgggaggattacgaggttaagaaattaagattattttagttaatatggtgaaatttcgtttttattgaaaatataaaaattagttgggcgtggtggtacgcgtttgtagttttagttattcgggaggttgaggaaggagaatcgtttgaattcgggaggtggaggttgtagtgagtcgagatcgcgtcgttgtattttagtttggcgatagggcgagatttcgtttcgaagaaaaaaaaatttttttaagtgatttgttttttggaatttaattttaaataatttacgttttttagtataagtttattggtgtgattttcgttatatgagttcggaatgttatttgttaataaatgagagtattaaatattttaatttaagaagtttttttttatattttattaagttatgtgaaattggtaagggtgattattgtttttgttttttaggtatgggatttaggtttagaggttggttatttttttaagcgggttataaattcgaattttgaattattatttttaaaagtcgcgtttttatttagggagagacggtttgtagtttttttttttattttgcggttttttagacgaaagttatttttttttgtttttataagtttttttatattttttttttttatgagtttaggtagggtaatttaattttcgtttttcgttacgaaaacgtttttagtcgtttagttagttagacggtttgttttatttttgcgttttatagatttttatacgcggatttatcggcgtcgttagaaggatttttagtcggaaatttagttcgatattttttttcgtcgttttaggggcgtttcggaagttatttcgtcgcgttttgcggttacgtcgaaacgt

SEQ ID NO: 67 - DNA, 6298 bp, Artificial Sequence
  chemically treated genomic DNA (Homo sapiens)
ggttgtatttagtttattgatgagtttattaaaggtatttttttatttgttttattgttttttatttttagtattttttttttatttttttttagagtttttatatttttgcgtatattatttatgtgtttttgtatgttgtttattgtttttttagaatttttggtatattaattatatttatttaaaatttttggttttaaatttaaaaatttttgttatatgtgagtttgattttgatgtttggtttgtttttttagattgtgttttttgttttttagtatattttgtaatttttttattattgttgttattgttgaaagttagatatgttgtattagttaaaaagaatttaggtagatgcgtttttaagtgtgaggttttatgtttatttggtaaagaggtaggttttgttattgttcgtggtgttagaggttaaaattttttattgtgtttttgtttttgttttttatgttgtttttggttgtttttagagatttttaaaatagggtttgaggtttgagtttttttagttgtaatgtttcgttattatataggagtttttttgatgtggtgataaggtgagggggagaggaggattttttgtagttttatgattagggtttaagttttttagtgagtttgagttgagtatttttttttttttttgtggaaggttagagttgattagagttggtaatttttttttttttagattggttagtttttggtagatttatttggttaggttttgatagagagttttttttgaggttaggttttgttaagaagaatagagagttttgagagtattttacgatggttatttattttttttttttggtaaaagtaaagtagattttttttagatttttatagtgagaatttgataggatttatagaggtaaaattgaggtaagtattgaggttttttttagattgagtttttttggagttttttaatttttaagttagtttgtattgagtttttagtaattttttaattatagtttagtgtttttattgatgttggttttagttgtgaaattagttttagtttttggtttttgtgtttgggttttgtttttggtaaattgtgattttttgaaaagttgtgattttttgtatttatttgtttgtttttttagtttttagggtagtggttttttttgtgattttaattttttggtggatttaagaagagttattgattttagtttgtttagttttttttttttttgttgtgaggatgggagtgataatttttaagttttttatatgttgaataggaaattgaaagttttttggtgtttttttgtaaatttattttaaaaatatttattataattgaaaagtgttaatattaaatttttagtttgtttatattttttttaaatttagataaatatatattttattttgtgtgtttgtgtgtgtgggttttgttgttgtttgttttttgtgtttttttttaagatatagggttttgttttgttaaggttggagtgtagtggtataatcgtatatttttgtagtttcgaatttttgggagaaagtgattttttcgttttagtttttagagtagttacgattataggtattaattattaagtttagttaatttttaaaattttttgtagagatgggagttttattttgttgtttaggttggttttaaatttttggttttaagtgatttttttgttttagttttttaaaatgttggaattatagatattttgtgttttgatttttgaaaggaaaaaataaagatttttaatgttttttattttgtacgtattttttttttaaataatatttttttgttgttattgttttcgttatgaatagtttaaagaaaaagaaataattaagggtagtaataggttaggaattatttattgaatattaggtttttttgtatagtttgatattttataaattgtgtgtatttgatgtattttatttttaaaaggtttaatgttttgtattatttagtagtaattaaaattttaagttttatttaattttttgatttattgtttaattttttaataaatacgggttaagggttaatggggttatttgtaagtaattttgtagtttatttagaaagttttgtaaagttagaaagtgattaaatgattgtttgttaagatatatttatatagtaataatttaaatgtatttgttaagtggttgtagagagagggatttaaaattttattttatatgaaatttttttttttggtgtttgttatttaataggattgtttgaattaggggatattatttggtgtttttgtaattatatgaaaattagttggttgaatattattgttttttatgtttatatttatatttgtatagatatatatatatatatatatatattatttttttttttatttttatatttatatttgtgtatatatatatatataaatatatattttatatatttttgaaaaggaaaattaatttaagggtatatttaatgaatatttaaaaatttttttgttgattaaattattattttgttttaaatttttgaaatgatttaaaaaaattttaaatgatttagatttattgttataaaatgtttgttttttgatgttataaatattatatattataattattggttagagataattgttataagtataatgaaaagggaaatgatggaagatttttgtagttatttttataaatgagggtgggaatacgatgggtagttttaaagttgaaaatagagaatatatgtggatttatattaatataattggtatttttggatagttaaaaatggttaaattgtaggagaagttcgagtaattattgttaatagaggaataaatttgagggtaataataatgatgataggttaggtattgtggtttatgtttgtaattttagtattttgggaattcgaggcgagcggattatttgaggttaggagttcgagagtagtttggttaatatggtgaaatttcgtttttattaaaaatagaaaaattattcgagtgtggtggtgcgtgtttgtaattttagttatttgggaggttgaggtaggagaattatttgtatttgggaggcggagttgtagtgagtcgaaatcgcgttattgcgttttagtttgtgggttagagcgagatttcgttttagaataataataatgataataataataacgttattaataatattaagagttaatatttattgagtgtttattatgtattagatattgttttaagtatatatttattattttatttaattatttataatattgtggtatagatatttttatatttattttataaataagtaaattgagttatggagagattaaacgatttgttagtaagatttaaagtttgtgtataagtttacgtttgattttggagttagtgtttttaatatagtattttgagaatgttaaattaaaaagtttttaatttatagtattttttttataattaaaaaagaaattatgagtaattatttttagtttttttttttttttaggtattttttatggttttttttaagatataatatatattatttagtgttgtagatttgaaaaaataaaagtagcgtgaagattaaaaattttttaaagagacggagtttcgttacgttttttaggttggaatatttaggtttttttagttttatatttttgagtagttggaattattttgttcgttaaggttaatgtttaatcgtatttttgtaggtttattgattagttaaaaagaggtgttgtatatattggttgttgttttgttagagtttgatgtttttatatagattattgtttttatatgttaatataattgaaagttattatagatatttatatttataatttaaagttaggttttaataagaaatttataaggtaaaggtgagaagtaaaataatttagcgttaagtggagatatatgtgtaatgttattttgttgggtttaaaatatattttttttttagaagattgataggtttgaagtttatgtttttaaagataaaagtgattatgttttgtttagtagtttgtaaagttgttaaaggttattttttttattttttttttgaaattggtttatatgtttattaaagttatttatatttatttgtaaatgtttaatatagttttagattttaagatttttttgtaattttattttttttgaagtttatagtaataggagtttatttttatttttaattgtatttatttagtaagtaaatttcgttatagaaaaatttagtagataaggtgagtttttttgtgtttcgtggtaaagagtgcggtgggtgatattgatttatggttaggtaatttggtaaggaaagatttcgttgtaatatatttgagtaacgagattaaaggaagggtttgttgttacgaggcgaagtttgtttttttgaatagagagtttagtagagttgggcggtaatcgtgtttagtattgaggtcgaggagaaagagagtaggagtattatattattgtattaagagtaggaaaatatgatgtatgtttgggattaggtaatcgaaatttttttttagtagcgttttttaaagtcgggtatcgttttttttcggagaaggcgtagagtttttagattcgggttgagtcgtatttttattttttttttttttttttcgtcgttaaatatagacgagtacgtgagcgtcgtagttcgttttagttgtgttttagttgatcgttttttgattggttgagagcggcgtgggttggggtggggatttgtcgtttgcgtcgttcgttattggatttcgaggaattcgtttttattttaggtgaggcgggtttgcgggagcgcgcgtcggtttgggtaggcgagcgggcgcgttttcgttttttttttttttttcgcgcgttcgagcgcgttttcgtttttgttcgttttttgacgttgttttagttttttagtgtatagtgttgtttcgtttgaggggataggaggattatttttttcgtcgtttcggttagtgtgtcgggttgggttttgataagttatttgaggagaggttcggagtcgggttcggatttcggcgattgtcgttcgtttttttttagttttacgaggggtttttcgtttcgtatttttatttttggatttgtttttttttttttttttcgcgtgtggagggagttagcgtttaggtcggagcgagtttgggggtcgttcgtcgtgaagatatcgcggggatcgatttattatggagggcgtcggcggcgcgaacgataagaaaaagtaagtttattttttcggttcgtcgttttttttttcggcgatttcgttcgtttgttcgttttgggtttttgggtcggtttcggcgttaatgggattggggggggtagtttttttgtttttgttgttgttttttttttttttttttttttaatttcgtcggtcgggttttttcgttgtttacgtcgttattttgtcgtggggggtgggagacgtttcgaaagtgtttttaggggtcggggtttgagttttgtttgtttttttcgtcggtcgtgggggtttcgcgtcgtttatttattcgttttaaaaatttagtttgttttgtggttttattcggaggggattttatttagtttgaaaatttcgggaagagaaatgagttgtagttcggtagtcgcggtttgtattcggagttttcgttttttttcgtttttattttttttagttttattgaaaattcggttttggggcggattttgtacgttggttttggttttttagtggatttggggttttgagttttcgattgagggattcgcgtggtcggatgcgattttgttttgtagttgtttagtcgtcgcgggtgtttttgtttttgtgtattagggatttgtcgcgatggttttaagatgcgaattttttagtttgtacgtgtaggttttgtttcgttttaatcgttttgaaaaatttgtttagattgagagttagagtaatgggaatttagggaaatggtaatattttaaagagaattttagaattggatatttgagtttatattatttgttacgagaacgtagatattataaatgaatatatgttttatttattttttaaataatgaaaatgtaggggttggttaaatttaggtagttttaatgatattgaaaaaagtatatgatgagtgaatgaaatgcggtattaaaatgttgtaaaaattttcgaattttgttttatttttttgaaattgaagtatattaaaggaaaatcgttaatatatatttaa

SEQ ID NO: 68 - DNA, 6298 bp, Artificial Sequence
  chemically treated genomic DNA (Homo sapiens)
ttagatatatgttgacggtttttttttaatatattttaattttaggaaaatgagatagagttcgaaaatttttgtaatattttagtgtcgtattttatttatttattatatattttttttagtattattaaaattgtttaaatttaattagtttttatatttttattatttgaagaatgaatgaggtatatatttatttataatatttgcgttttcgtgataggtgatatgaatttaagtatttaattttgaagttttttttaaaatgttgttatttttttaaatttttattattttgatttttagtttaggtaagttttttaaggcgattaaaacgaaataaaatttgtacgtgtaaattaaaaagttcgtattttaaggttatcgcggtaaatttttaatgtataaaggtaaagatattcgcgacggttggataattataggataagatcgtattcgattacgcgagttttttagtcgggaatttaaggttttaagtttattggaaagttaggattagcgtgtagggttcgttttagggtcgagtttttaatggaattggagaggatgggggcgggaaggagcggaagtttcgggtgtaaatcgcggttatcgagttgtagtttattttttttttcggggtttttaggttgggtaaagtttttttcggatggggttatagagtaggttgggtttttgaggcgggtaggtgggcggcgcgaggtttttacggtcggcggggagggtaagtagggtttagatttcggtttttgaaagtattttcgaggcgttttttattttttacgataagatggcgacgtggatagcgggggagttcggtcggcgaggttgggggaagagaggggaggggagtagtagtagaaataaaaaggttgttttttttaattttattaacgtcgaggtcggtttaggagtttagggcgggtaggcgggcggggtcgtcgggggagaaggcggcgggtcgagggaatgggtttatttttttttgtcgttcgcgtcgtcggcgttttttatggtgaatcggttttcgcgatgtttttacggcgggcggtttttaggttcgtttcggtttaagcgttggttttttttatacgcggagaagagaaggaaaggtaagtttagaggtgggggtgcgaggcgggaaatttttcgtgagattagagagaagcgggcggtaatcgtcggggttcgggttcggtttcgagtttttttttaggtggtttgttagggtttagttcgatatattggtcgaagcgacgaagagggtgatttttttgtttttttagacgaggtagtattgtgtattgaggagttgaggtagcgttagggggcgggtaagggcggaggcgcgttcgggcgcgcggggaggggagagggggcgggagcgcgttcgttcgtttgtttaggtcggcgcgcgttttcgtaagttcgttttatttgaggtggaggcgggtttttcgagatttaatggcgagcgacgtaggcggtaagtttttattttagtttacgtcgtttttagttaattaggaggcggttagttgaggtatagttgggacgggttgcgacgtttacgtgttcgtttgtgtttagcggcggaggaaagagaaaggagatgggggtgcggtttagttcgagtttggggattttgcgtttttttcgaaggaaggcggtgttcggttttgggaggcgttgttgagaagggatttcggttgtttggttttaaatatgtattatatttttttatttttggtgtagtaatgtaatgtttttgtttttttttttttcggttttagtgttgggtacgattgtcgtttaattttgttgggttttttgtttaaaaaagtagatttcgtttcgtggtagtaagttttttttttggtttcgttgtttagatgtgttataacggggtttttttttattagattatttaattatgggttaatgttatttatcgtattttttgttacggagtataggggaatttattttgtttattaagtttttttgtggcggagtttatttattgaataaatgtaattaaaaataaaaatgaatttttgttgttgtaaattttaagggaaataaagttgtagggaaattttaaaatttgaaattatgttaagtatttgtaaataggtataaatgattttaataagtatataaattaattttagggaaagagtagaaaaaatggtttttggtaattttgtaagttattaaataaaatataattatttttgtttttggaggtataaattttaagtttgttagttttttaaaagaaaaatatgttttgagtttaataaagtagtattgtatatatatttttatttggcgttaaattattttattttttatttttgttttatgagttttttgttaaaatttagttttgggttgtaaatataaatatttgtagtggtttttaattgtattagtatgtaaaaataatggtttatatagaagtattaaattttgataagataataattaatgtatatagtatttttttttaattggttagtagatttataaagatacgattaaatattgattttagcggatagggtggttttagttatttagaggtgtgaggttggagaagtttgggtgttttagtttagggaacgtagcgagatttcgtttttttagaaaatttttgatttttacgttatttttgtttttttagatttataatattaaatgatatgtattatgttttgaaaagaattatgggaaatgtttgaagagaagaaagaattaaaaataattatttataattttttttttaattgtggaaagaatattgtaaattaaaaattttttagtttaatatttttaagatattgtgttaagaatattggttttagaattaagcgtgagtttgtatataggttttgaattttattggtaagtcgtttaatttttttataatttagtttatttatttataaaatggatataaaagtgtttatattatagtattatggatggttaaatgagataataaatgtatatttagaataatatttggtgtatagtaagtatttagtaaatgttagtttttagtattgttggtggcgttattattattattattattattattttgaggcggagtttcgttttggtttataggttggagcgtagtggcgcgatttcggtttattgtaatttcgttttttaggtataagtgatttttttgttttagttttttaagtagttgggattataggtacgtattattatattcggataatttttttatttttagtagagacgaggttttattatgttggttaggttgttttcgaatttttgattttaggtggttcgttcgtttcgggtttttaaagtgttgggattataggtatgagttatagtgtttggtttattattattattattgtttttaaatttatttttttgttaatagtaattattcgggttttttttatagtttagttatttttaattatttaagaatattaattatgttaatataaatttatatatattttttatttttaattttggaattgtttatcgtgtttttatttttatttatgaggatagttgtagagattttttattatttttttttttattatatttatagtaattatttttggttagtgattatagtatataatgtttgtgatattaaaagataagtattttgtaatagtaaatttaagttatttaaaatttttttggattattttaaaagtttaaagtagaatgataatttgattagtaaaaaaatttttgaatatttattaaatatgtttttaagttaatttttttttttaaaaatgtataaaatatatgtttatgtatatgtgtatatataaatataaatatgaaaatggaaaggaaagtagtatatgtgtatatatatatatgtttatataaatataaatatgaatatggaaagtagtaatatttaattaattaatttttatatagttataaaggtattaaatagtattttttaatttaaataattttattaaataatagatattaaaaaggaaaattttatataggataaaattttaaatttttttttttataattatttaataaatgtatttaggttattattatgtaagtatattttaataaatagttatttaattattttttaattttgtagaattttttgagtagattataagattatttgtaaatgattttattgatttttagttcgtatttattaggaaattgggtagtgaattaggaggttaagtaaaatttgaaattttgattattattaaataatatagagtattgagttttttgaaggtgaaatgtattagatgtatataatttatagggtattaaattatataagaagatttagtatttagtaagtgatttttggtttattattatttttagttgtttttttttttttaagttatttataacgagaataatggtagtaaaagggtattgtttggaaggaaagtgcgtataagataagaggtattaaaaatttttgttttttttttttaagaattaagatataaagtatttgtgattttaatattttgggaggttgaggtaggaggattatttgaggttaagagtttgagattagtttgggtaataaagtgaaatttttatttttataaaaaattttaaaaattagttgggtttggtggttagtgtttgtagtcgtagttattttgaaggttaaagcgggaggattatttttttttaggagttcgaggttgtagagatgtacgattgtgttattgtattttagttttgatagagtaagattttatattttaaaaaaaaatataaaaaataaataataataaaatttatatatatagatatataaaataaaatgtatatttatttgagtttagggggaatataaatagattgaaaatttgatattagtattttttaattatgataaatatttttaagatgaatttataaaggaatattaaggggtttttagttttttgtttaatatgtaaagagtttggaagttgttatttttatttttataataagaaaaaaaaaagttaagtaaattgaaattagtaattttttttagatttattagagaattgaggttataggaaaaattattgttttaaaaattagagagatagatagatagatatagagaattatagttttttagagaattatagtttattaggagtagagtttaggtatagaagttagaagttgaagttagttttatagttggagttaatattagtaggaatattaaattgtaattggggaattgttggaggtttagtgtagattagtttgagagttaaaaaattttaaggaggtttagtttgagaggggttttaatatttattttagttttatttttgtgaattttgttagatttttattgtaaagatttgagaaaaatttgttttgtttttgttagggagaaggggtaagtaattatcgtgaaatatttttagggttttttgttttttttaataagatttggttttaagggaaattttttattagagtttaattagatgaatttattaaaggttaattaatttggaggaagggaaattattaattttggttagttttagttttttataggggagaagggaaatatttaatttaagtttattaaaagatttgagttttaattataggattgtagaaagttttttttttttttttattttattattatattagaagagtttttgtgtaataacggggtattatagttaaaagaatttaaattttagattttattttaagagtttttggggatagttaaagataatataggaagtaaaaataaggatatagtaggaaattttagtttttgatattacgaatagtaataaagtttatttttttgttagataaatatgaaattttatatttaaaggcgtatttatttaagttttttttaattgatatagtatgtttggtttttaataatgataataatgatagaaaaattataaaatatgttaaaagatagaaaatatagtttgaagagataaattaaatattagaattagatttatatatggtagagatttttgaatttgagattaaaaattttaaataaatatgattaatatgttaaggattttaaggaaatagtggataatatgtaagaatatatgggtaatgtacgtagagatatggaagttttaagaaagaatagaaaggaaatgttagaaataaaaaataatagaataaatgaaaaaatgtttttaatgggtttattaatagattggatatagtt

SEQ ID NO: 69 - DNA, 7380 bp, Artificial Sequence
  chemically treated genomic DNA (Homo sapiens)
  unsure (12, 91, 103, 190, 212, 271, 279, 677, 694, 718, 724, 729)
  unsure (861, 864, 954, 1249, 1464, 1757, 1849, 1894, 1914, 2038, 2117)
  unsure (2130, 2471, 2698, 2831, 2956, 3023, 3308, 3354, 3415, 3423)
  unsure (3566, 3600, 3605, 3640, 3654, 3760, 3929, 3937, 4110, 4480)
  unsure (4530, 4552, 4587, 5252, 5296, 5303, 5367, 5382, 5483, 5536)
  unsure (5558, 5567, 5654, 5661, 5668, 5825, 5851, 5932, 6184, 6225)
  unsure (6227, 6513, 7312)
atttaatgtggnataattttgtagaggttttgttaataaattgaatgagttattgaaagtgaggtatttattttagtcgtaaattttggtngaattttttttntgttgttggatatgaattagattttaggaaatttagaaagaatatagaaatagtattattttgtttttagtgataaaatatttattnttttttcgggattaaaagtttngggttatttataaatatatagttaaataattgttagtaataatattaaaagaatttaangggggggntcgggcgcggtggtttacgtttgtaattttagtattttgggaagttaaggtttacggattatttgaggtcgggagttcgagattagtttggttaatatggagaatttcgtcgttattaaaaatattaatattaaatattaatattttatcgttattaaaaatattaataaaaattgtcggatgtggcggttggtgtttgtaattttagttatttaggaggttgaggtaggagaattgtttgaatttaggaggcggaggttgcggtgagttgagattacgttattgtattttagtttgggtaataagagcgagattttattttaaaataaaataaaataaataataataataaataatttaagggggaaatgaaagtttaaaataattggatatttttnatgagtaaaattaattnttaatttttattttatagtatatnataaanaattnaatttgaaatgggttataaggttaaatgaaaaagtttaaattatgaaagttataaaggaaagtataggagaatatttttagaatttaggagtagttaaaagttttttagtttatagtaagtaataattatgnaanaaataaattgataaattgaattttgttaaaattaaaaattgtttatggaaagacgttattataaaaattaattagtaagttatagattgngaagaaaatatttataatatataaatatttgataaagagattatttaaagtatataaaagaatttttaaaatttagtaattaaaagataattaaatttaaaaatgggtaagagatttgaataggaagatgtataagttattaagaagtatatgaagtagtatatgttattattttttattaggaaaatttagatgaaaggtttattgagaattgattatttatttattagaatggttataagttttaagagaaattgatattattaaatattggtgaggcgttagaataattagnaatttttatatattgttgttggaaatgtaggataatttatttgttttagaagattatagaagagttttttttaaagtaaaatatatattttttttatgatttagtaattttatttttatttgtttatttaagagaaaggaaagtatgtgtttataaaagaatttagataagaatttttataaatattttatttatgtttaaaaattggaaataantttaaatgtttattaatataatagataaatttttgtatatttatagagcggaatattatttattaatataaagaaatgaattatatgtaatattggtgaatgtttaaaatattgtgtagagtgaaagaagttatatataagagagtatatatagtatgattttatttgtatgaaattataaaataagtaaaatgaatttatggtgtaaggaggttatgtaaagagaaagagaaggttagttagtttagtattttagttgagtttaatttagattgtagaataatgagaaatanataaaatgattgttgttttaagttattaggttttggagtgatttgttatatagtaattaataattagtattattgttttttttatggaattngttagaagtatgtgatatgatatatatggaagggttttgtaagtnggataagtgttaagtatttngtgagcggtagttatttttgggtatatgtgtagattggggttagtgtttattagggatatgtttatttgagaattaatttgtggaatttagagggttttattatttaattaatataatttttgngttttttttatttttttttttttttttgagtagttatttataattgtttttggggaagagagagagagaaagagaaagnaaagatgtttatnggtttgttaaaaaaataaaagaaaataatatttataaatggttagagtagaaaagatgtattaattttatttattttgttaaggaatggggttagattgaagattagttaatgtttataatttttgaggttttaagaaatatttttgaagttagagaaggatggagagaagtgagagggagttattatggtttaaggggttggtttttaatttggttcgtgatatgttgattaggtttagggaaattaaattaaatgaattaaatttttaagaaattgtttgattaattagaacgttagtttatttatttgtaatgagaaatgtaatttttaagttatagntatttggttttgttaggtggtaaggagaagattattttgggaaattagattatttgatttggtaagagttttatgtttggaaatatggggaagtgaggatatgcggagaattatgagtaggtggagtattttgggcgtgttgagtaatgttagtggattgttatataaagtttaggtaacgtattttttatgtatttggaatttgtaatttaatagatttttaattnaggttgagaggatgtttttagttttgttagtttatggatttatagggatgtaaggaatttaagatagggaaatagtttttgtttttaaaaggatagcggagatgaggttttttttttattttttaaaaaaatnaatataatataattgatggatttagatcgtttacgagagattattatttttacgtttagtttaggtattttttttagaattttttttttaataatgtaagtgtttttgttatttttatttatttnatttttgtttttttaagtttattttatattatttgtttatatgttaaattttaaacgatgagttttntgaaggttaaaattatgttttatttatttttttttattagttttcgtatagtcgttggtatatatatcgtggtgtttaataaatgtatgtggtattaattaaaagtttgttgtttttggaattcgtttgaaatttgaaatattgtaataatattttatttagaatgttgttttatttttttgttataattttagagtgaggaagtagaggttattagattacgtgtttttttatgaagaatttatagtttagggtagaaaggtatttgtcggaattattttgttnagggaattttgaatttcgttgcgtcgtcgtttttgatttttggggnttttaggcgtttttttttttataatttttttttggggaagtaaattttattaagatattanttatattntttttttagcgatttagtttggggttataaaggtttttacgttttattgaaaaacggtttttttttatttgtgtttattcgtttttgtagttttttttttagatcgaagattagggttttagtaaggagaggtaaggaggganggggaagaatttgtttggtttttcgcggagtttntgtangggggcgtcgcggttgtacgttagcgttcgtattnattttaggcggganagggagttattatatagggggtcgtacgtagatttcggggatcgtgggtgttacgaggttaaattggtagagggagacgttgtagttgttgtaatagtaaggaaangtcgaagtttttttaggggatattttataaaattattttaattatcgtgtaaatttaataatttgatttaagcgtaattatttgtatttatttagagtaaatatttttaaaatttcgtttagtgtgtttgtgtttttttcgttttttttcgttttaggtaaatgtttantttttttntttttttttatcgttaatatttttttgtagcgtgggaaatagtgtttagtagtttagtttttcgtttttcgttttgttttttgtattttattcggatttataggaagtagttattttttggtggtggtggaaattgggtaagaaagaagacgttaagtttggtcggggttagngagaaatattgagaagggtcgttattttttattcgatttaaattaattattttaaatttggttattttttggaattatttggggagttttaaaaattatggacgttttgatagtatcgtagaggttttgatttaattgatttgggatgcggtttgggtatcgcgatttttttaaaattttttaggttatttttagtttgaaaattatggatataaattttttatttttttttttatttagattaaaaaaaaaaaaaaaaatttaagtttaagttgatggtttagggaatttggtatttgtttttttgtaattagttagtgttgtaaggttttcgaaaatcggcgcgagcggcgacgttaaatacgcggtnggcggggcgagcgggttaggcgggcggtgtcgcgcgtggtttcgtttttngtacgtttatgggcgcgaggtngcgggttttgacgttatttttgttagggtcgcggntatatgggcggtcggatgcgttgagttcggcgttgcggggtcgcggagcgttggggagtagcggtcgtcggcgcggggaggggggtggggtgggacggcgtatcgttttcggtgttggtattaggggttggggtcggcgcggtgttttttgtttttttgtagtcgtcgatattttttttttttttttttttttaattttgaatattttgtaaaacgaggggttcgaggtaggtgagagtattttgtacgtcgtcggggagttcgcgggtatttggcgcgtttttttgggatcgtttgtattggaaattcgaaagtttttttttaatatatatttttatgtagatgtatttataaagatataagtaatttttttttttttttttttttatcgttttgagagcgagtatttttggtaaaggacggaggaaaagtttagtaatattttagggggcggttgttttttttttatttttttttttaaggggaaaaaatttgagtgtatcgcgatggagaaaatgtttcgatcgttttttttgaattttatttttatttcgtttttttacggcgtgtttaggtttttgttggagaattcgttgaagttttttttttattacgaagacggtgagcgttgtcgcggtttcgtttcgggaagggacgacgttttngggggttttttttcgcggtcgggtacgttcgttggagtattttnttaattntcgttttcgttttgtttcgcggcgtttcggtttcgcgttgatgaaattgaggagtttatttagntattttttttttttntttttttttttttatgaaaggggagggattttttttgagttatatttaaaagagtttcgggtattcggtttttttgggtttcgtttttgcggcgcgggtgnggaggtgtaatttgataggttaggatcgttttttagaacgaggtatattcgtnacgtagagcgagttcgtttgtnggagggtangagtttttcgggttggggaggagaaattttggggtttggttttgtgcggggtagggggcgggggtcggtttgagggagggggttttnattgcgntagtttngggttttggggttgtgttatagtttttgttattggttagtatttggaatttacgaggtgtgagagaagattcgtttttttttggtgaagggtagttgagaaagcggggtgggggttggggtcggtggggggagtggtttttcggcgggaagtcgtgntacgtttttagcgttgatattttttncggtgtattttttttggtgggaggggagagcggagtaggtttacgtgtaatcgcgtaggagttttttttggtttgagtttnttttttggtaagttttaaatttttttaagataattttggttttagtagtagaggaggggtacgtgtgatgaggttttaaattcggttaagtgatgttacggatttgggttgatgcgattttatgttttcggtattatagtagtaaatgcgaatcgtgcggtttatagtgtaaagttttgaaaggttatttggttataaatagtttgggagtatttgtatttttttttttaggagaggataatttgttgtatntgtaagagtttgtaatttgtagatgatagttagggattttntnttttaattattttttaaggaagagtatttgggaggaaggggttgtttgtaggtttttgtatttgtgggtgttttaagttagatttttagatgagatggtagagggttagaatggatggtagtggaggttgtgtttttttgaagatgaaatttagaagtaaattttttaattttagattttatttacgattgaatattagaattggtaagattcggaatgtttgttaaagatttaatgggcgagtagtatttttaggtagtaaatagttgtatatttttaatataanatgtatagaataatttattttttttaatagttttgtttttgaaaggttttgtaaatgtatattttttgtaaattggattatatttaaatgtttggagaagagaaggaagaaaatattttgtatttttttaaattttttttgtaaaaattagtgtgttttagtggttttagaagtaaatatatgtgagtttagaaagtttttattttttgttaatatgaggtattggttaagtttttttaagttttagagttttcgagtttttgttgtaaatggaggtaattgttattttgtaagtttattgtgagatttttgagataatatatggaaagaattaggtatttagtaggtattttaaatatgatgttaaagaagggtggaaggtttttgttttattaaaattaagattattaatttattggttttgtaagtttgaatgattttttattgttgttgtgatgaatttttggaagataatttaagtttggttattggttgttgtttttttaaaaatgatagtagttgtatataattatagatgttatatttttattttaggtttaagttattattttttttaaataatgtgttgagattgttttttggtttttattttagattagtttgtagttttgttttaaggattagtgttttttttttaaagtaaataggaagatgttgaaaaataggtagagatttacgttttgtttgaatttttaattttagatttataaaagatagtagttagagaaggattttgttattcgtgagaaatagttttataataggttaggaaaagtgnataaaagagcggtattgttttttttttttttttttttttttaagtttagttttttttttttttgtagt

SEQ ID NO: 70 - DNA, 7380 bp, Artificial Sequence
  chemically treated genomic DNA (Homo sapiens)
  unsure (69, 868, 1154, 1156, 1197, 1449, 1530, 1556, 1713, 1720, 1727)
  unsure (1814, 1823, 1845, 1898, 1999, 2014, 2078, 2085, 2129, 2794)
  unsure (2829, 2851, 2901, 3271, 3444, 3452, 3621, 3727, 3741, 3776)
  unsure (3781, 3815, 3958, 3966, 4027, 4073, 4358, 4425, 4550, 4683)
  unsure (4910, 5251, 5264, 5343, 5467, 5487, 5532, 5624, 5917, 6132)
  unsure (6427, 6517, 6520, 6652, 6657, 6663, 6687, 6704, 7102, 7110)
  unsure (7169, 7191, 7278, 7290, 7369)
gttgtagaagaagggaaagttggatttaaaaaaaaagaaagaaaagaaaaataatatcgtttttttatntattttttttggtttgttataagattattttttacgaatggtagggtttttttttggttgttgttttttgtagatttagagttaaaagtttaggtaggacgtggatttttgtttgttttttaatatttttttatttattttggaaagaaggtattagtttttggggtagggttataggttgatttaggataaaaattagagaatagttttagtatattatttgagaagagtaataatttaaatttaaaataggaatataatatttgtgattatatataattgttgttatttttaagaaaataatagttaataattaggtttgaattattttttaggaatttattatagtagtaataggaggttatttagatttataaagttagtgagttagtggttttaattttggtaaagtagggattttttatttttttttaatattatgtttagagtatttattggatatttggttttttttatatattattttaaaaattttataataaatttgtaaaataataattatttttatttataataaagattcggaggttttgagatttgagggaatttgattaatgttttatgttggtagagaatgagaattttttgagtttatatgtgtttgtttttaaagttattggggtatattgatttttataaaaggagtttaaaaaaatataaagtgttttttttttttttttttttaaatatttgagtatgatttaatttataaagagtatgtatttataaaattttttaaaagtagagttattggaaaaggtgagttattttatatatnttatgttggaagtatgtagttatttgttatttggaagtattgttcgtttattaggtttttaataagtatttcggattttgttaattttagtatttagtcgtgggtggaatttgggattaaggaatttgtttttgagttttatttttagagaaatatagtttttattgttatttattttaattttttattattttatttgaaaatttgatttaaaatatttatagatgtaaaagtttgtaggtagttttttttttttaaatgtttttttttaaaggatagttagggnanggggtttttggttattatttgtagattgtaaatttttgtanatgtaataggttgtttttttttagaaaagaaggtgtaagtatttttaagttatttgtagttaaataattttttagaattttatattgtgagtcgtacggttcgtatttgttattgtgatatcgaaggtatgaaatcgtattaatttaaattcgtggtattatttagtcgggtttggggttttattatacgtattttttttttattgttaaggttaaggttgttttgggaaggtttgggatttattaagaaangggtttaagttagaggaggtttttgcgcggttatacgtgagtttgtttcgttttttttttttattagaaaaagtgtatcgnggaaagtgttaacgttggaggcgtgntacggtttttcgtcgagagattattttttttatcggttttagtttttatttcgtttttttagttattttttattagaagaaaacgagtttttttttatatttcgtgagttttaaatattaattagtaatagaagttgtaatataattttaaaatttnaggttancgtagtngaaatttttttttttaagtcgattttcgttttttgtttcgtatagaattaggttttagggttttttttttttagttcgggaggtttntgttttttngtaggcgggttcgttttgcgtngcgggtgtgtttcgttttagggaacgattttgatttgttaagttatatttttntattcgcgtcgtaggagcgggatttagggaggtcgggtgttcgaagtttttttaaatgtagtttaggaggggtttttttttttttatggaggaggaggaanggggaggaagggtgnttgggtgagttttttaattttattagcgcggggtcggggcgtcgcgggatagggcgggagcggnggttggngggatgttttagcgggcgtgttcggtcgcggagggggatttttnggagcgtcgttttttttcggagcggggtcgcggtagcgtttatcgttttcgtggtgaagggggagttttagcgggttttttagtagggatttgagtacgtcgtagggaggcgggataaaggtgggatttagggggagcggtcgggatattttttttatcgcgatgtatttaaattttttttttttaaaaaaagaaataagaaagaaataatcgttttttaaaatgttgttgagtttttttttcgttttttgttaaaagtattcgtttttaaggcggtggagaaaagggaagaaaaaaattatttatatttttataaatatatttgtataaaaatatatattaaaaaaaaattttcgggtttttagtgtagacggttttaggagagcgcgttaagtgttcgcgggtttttcggcgacgtgtaggatgtttttatttgtttcgaatttttcgttttgtaaaatgtttaaaattgaaaaaaagaaagaaaaaaaaatgtcgacggttgtagaagggtagaagatatcgcgtcgattttagtttttagtgttagtatcggaggcggtgcgtcgttttattttattttttttttcgcgtcggcggtcgttgttttttagcgtttcgcggtttcgtagcgtcgggtttagcgtattcggtcgtttatgtgntcgcggttttgataagagtgacgttagggttcgtnatttcgcgtttataggcgtgtngggggcggggttacgcgcggtatcgttcgtttggttcgttcgtttcgttngtcgcgtgtttagcgtcgtcgttcgcgtcgattttcggggattttgtagtattggttggttgtaggggagtaggtgttagattttttgggttattaatttaggtttagatttttttttttttttttggtttgggtgggaagaggaatgagaaatttatatttatagtttttaagttgggaataatttgaggagttttaaaaaaatcgcgatatttaggtcgtattttagattaattagattagaatttttgcggtgttattagggcgtttataatttttaaagttttttaggtggttttaaagagtagttaagtttgagatgattggtttagatcggatggaaggtaacgattttttttaatattttttnttggtttcggttaagtttagcgtttttttttttgtttagtttttattattattaaaaaataattattttttataagttcgaatgggatgtaaaaagtagagcgggaagcggaggattgagttgttgggtattgttttttacgttgtagagaggtgttaacggtggggggagangggggggntagatatttgtttgaaacggaaagaggcgggagagatatagatatattgaacgggattttaggaatatttattttgggtgaatataggtgattgcgtttgggttaagttattaggtttgtacggtgattaaaataattttgtaaagtattttttaagggggtttcggtntttttttgttgttatagtagttgtagcgtttttttttgttagtttgatttcgtggtatttacggttttcgagatttgcgtgcgattttttgtgtgataattttttntttcgtttggggtnggtgcgggcgttggcgtgtagtcgcgacgtttttntgtangagtttcgcggggggttaggtaggtttttttttntttttttttatttttttttattaagattttagttttcgatttggggaaggggttgtaagaacgaatgggtataaatgaaagaaaatcgttttttagtgggacgtaaaggtttttgtgattttaggttgagtcgttggggaagngatgtggntggtgttttgatggggtttatttttttaggagagggttgtaagagaggaggcgtttgaaanttttagagattaggagcggcggcgtagcggggtttagagttttttnggtagggtgatttcggtaagtgtttttttgttttgagttgtaggttttttataaaaggatacgtaatttagtgatttttatttttttattttaaaattatggtaaaagggtaaggtaatattttaagtgagatgttgttgtagtgttttaggttttagacgaattttagaaatagtaaatttttagttaatgttatatgtatttattgagtattacggtatgtatgttagcgattatgcgggggttagtgaaaaaagatgaataaaatataattttaatttttanagaatttatcgtttagggtttggtatataagtaaataatataaaataggtttaaaagaataaaaatnggatagatggaggtgataggggtatttatattattaggaaagggattttagagaaggtgtttgagttgggcgtggaggtaatagtttttcgtgaacggtttgaatttattaattatattatattngtttttttaaaaaataaaaaagggattttattttcgttatttttttggagatagaggttatttttttgttttgagttttttatatttttgtaagtttataaattggtaggattgagagtatttttttagtttnggttagaaatttgttagattgtagattttaggtgtatgaaagatgcgttatttaagttttgtgtaatagtttattgatattatttagtacgtttaaagtgttttatttgtttatgatttttcgtatgtttttatttttttatgtttttagatatgaaatttttattaggttaagtaatttggttttttagggtaattttttttttattatttgatagaattaaatanttgtggtttggaaattgtattttttattgtaagtggataaattggcgttttggttgattaagtagttttttgggaatttggtttatttaatttaatttttttgagtttgattaatatgttacggattagattgaggattagttttttagattatggtgatttttttttatttttttttatttttttttaattttaaaggtattttttagagttttaaaaattataagtattggttaatttttaatttagttttattttttaataagataaatgaaattggtatattttttttattttggttatttgtaaatgttatttttttttatttttttaataaattnatgaatatttttntttttttttttttttttttttttttttagaagtagttgtggatggttgtttaagaggaaggagagggatagaagaaatntaaaggttatattggttgggtagtaagattttttgaattttataggttaatttttaaatggatatatttttaatgagtattaattttaatttgtatatatgtttagagataattgtcgtttatnaagtgtttagtatttgtttnatttatagagtttttttatatgtgttatattatatatttttgatnaattttatgaggaaagtaatgatgttgattattgattgttgtgtaatagattattttaaaatttagtggtttaaaataataattattttatntattttttattattttgtaatttaggttaggtttagttgggatattgggttggttggttttttttttttttttatatggtttttttatattatagatttattttgtttgttttataattttatataagtgaaattatattgtatatatttttttgtgtgtagttttttttattttgtatagtattttagatatttattaatgttgtatatagtttatttttttatattagtgagtagtatttcgttttatgaatatataaaagtttatttgttgtattggtggatatttgggnttgtttttagtttttaggtatgaataaaatgtttatgagaatttttgtttgagtttttttgtgaatatatgttttttttttttttggataaataaataggagtaggattattggattatagaaaagatgtgtgttttattttagaagaagtttttttatagttttttgaagtaggtaaattgttttgtatttttagtagtagtatatgagagttnttggttgttttagcgttttattaatatttagtggtgttagttttttttaaaatttgtagttattttagtgggtggatagttagtttttaatggattttttatttgaatttttttgatgaaaaatgatggtatgtgttattttatgtgttttttagtagtttgtatatttttttgtttaagttttttgtttatttttgaatttggttattttttgattattgaattttaggagtttttttatatattttggatagtttttttgttagatgtttgtgtgttgtgaatattttttttntaatttgtggtttgttgattagtttttataataacgtttttttatgagtagtttttaattttgataaagtttaatttattaatttgtttnttntatgattattgtttgttatgaattaggaaatttttgattatttttgagttttggagatatttttttatatttttttttataatttttatagtttaagtttttttatttagttttatgatttattttaaattnaattntttgtngtatattatgaggtaaggattaanggttggttttatttatnggggatatttaattgttttagatttttattttttttttgaattgtttgttgttgttgtttgttttgttttgttttgagatggagtttcgtttttgttgtttagattggagtgtaatggcgtgattttagtttatcgtaattttcgttttttaggtttaagtaatttttttgttttagttttttgagtagttgggattataggtattagtcgttatattcggtaatttttattagtatttttagtagcgatggggtattagtatttagtattaatatttttagtagcgacggggttttttatgttggttaggttggtttcgaattttcgattttaggtgattcgtggattttggttttttagagtgttgggattataggcgtgagttatcgcgttcggntttttttnttgaatttttttgatgttattgttgataattatttgattgtgtatttgtgggtgatttnaaatttttgatttcgaggaaanaatgggtattttattattaaggatagaataatgttatttttatgttttttttaagttttttgggatttgatttatatttagtaatangaaaaaagtttnattaaagtttacggttaaaatgaatgttttatttttagtggtttatttagtttgttgataagatttttataaagttgtnttatattaagt

SEQ ID NO: 71 - DNA, 7089 bp, Artificial Sequence
  chemically treated genomic DNA (Homo sapiens)
gattttgggagaagaaatagtatatatatttaaaagttttggttttgttgtagttttattgtgtttgtttttaaaaaattcgatgtgaagattttttttaaataaaaatattttttataataggataaagttatattttagtatagtgatatttatgattattttcgttttttttttgtatggtttttgtgttatttttgataggtttattattttagtgtattatattttgtaatttggttttagatagaagatttttttttttttttagaagtttgtttgggttgtatagggttatttcgtttagtagtgtttataattttgtttgttggttttttgttgtttttttttatttatgttacgtatacgagtttataaggattgtttttcgatttttttttttttttttttttttttgagatggagtttttttcgtgttgtttaggttggagtgtaatggcgtaatttttgtttattgtaatttttgttttttggatttaagtaatttttttgttttcgttttttgagtagttgggattataggtatgtattattacgtttggttaatttttgtattttttttagtagagatatgttggttaggttggttttaaatttttaattttaggtgattcgttcgtttcggttttttaaagtgttgggattgtaggtgtgagttatcgcgtttggtcgttttgttgttgtgaaatgttttttttaggcgtattaaatttatttatttatttattgaatttaagttaattgtagttgaaaataaattaacgatgtagttttatggttagagtattgttaaaagttagaattaatttaattttgtttatagttaaatcgttattattgaaagatggtatttgaggatgtaaatatttgaaatttttattttgttattgtatatttttttttaattaaatagtaggtgttaatataataggaagttttttaagaaagtattatgtaagttttagtatttgaatatcgtaatattttggtttatttaatgttgtttagatattgtaagttgaaagaaggtttttattaatatatttatttgtaaaaagatggtgattatttttacgaagtttatgagatcgttcgtataattttttggtattttttcgagattttggatataattttatttttattgtttttattttttgtttagaattagggttaagaaatataataattggatattattgggtatagttaagacgattaattgtatttggtgttatatttaataaagtatgtttgttttagaaatagaaagaaaaatatatataaagatataagatattattaattaagaattattaaatttagttgggtgtagtggtttacgttacgtttataattttagtattttgggaggtcgaggtgggtgaattatttgaggttaggagttttagattagtttggttagtatggagaaattttatttttattaaaaatataaaaattagttaggtatggtggtgtacgtttgtaattttagttatttgggtggttgaggtataagaattatttgaatttgaaaggtagaggttatagtgagtcgagattacgttattgtagttttatttgggtaatatagtaagattttattttaaaaataaaaataaatataaattaaaataaaataaaatattttattatatttagaaaaagttaaaagtttgtattatattttagtggtaatagatttttttgtattttaatgttttaggagtatatattaaaaaattaattgtaagttaatttaattttatttttagttaaatttttaaaaatttttttatgaagtttatttttaagatttagttttaatatcgtaatttgatagtattatttacgtatagttagaataaaaatgtttaagaatttaatgtttttgatattttttatgaatgtaaataataaattataatttgaattgtattgatataatatataagtagtttgttaattatatttaaaaattatatatttgttttgtggtaatgaaaaattattttttgatgtttatagtaattatttttttgaaagtaattattataatgttttttagtaagggtttaatttttttatagtatgttagtaatagttttagaaaaattattttttatttttaaattaattaaattttattttatttaaaattataataatataatgaaatgggttaagttttaataatttatttgatttatgatttgttttattgtatgtaggcgaataatgttagagttacgttggttagttttagcgtttcgtggtttattttttatttattatgttaggataaaaataagatattaaatttttattggttagataggagttttttaattattggttataattgatatgtcggattggatagtattttgtttgtggaaattgttttatgtatgtagtatttaaagtgagttttaatatgtatattttttttttttttttttattatttttttaattattttaatattttggaaaaaaatttagttattaaagaagaaaaaatatataggaatgtatattttttttttttgtttggggttttaatatggtttaatagggtattattttttatttttttttatattgtaatatttagagaaaatattatttgtatggtatattgagataaattgagggggttgtttttttgttaagttttaattagttattattggtttaagaggttaatattttggtatgtttattaattatcggtaatggtgttatagtggattgtttagggagttttgggttagagattttagttatattagtagaaggggaatttgggggtaggaagttgtttatttgtaattgtgagatagtttatggttttattttggtaatttgtttttattggtgtatattgtgttaaatgtagtttgggttggtttttaattaattattttagagtatagtaacgtttgtgattttggttataaggaaagtttgaaaggaaaggaagagttttggtgttttagagattagataaaggtagagatttggaaagataagttatattgaggtttaagataaatgattttggagaatgagattattataagataaagtattatgggtaagtagggtagaattttaaatttagtgaatattggagaattaagaagaaagattaattgggaattttggttggaaaaaaaatgttattaattttttaatttaaaagattgttattagatttaaagaagatataaaattaagttatttgaattttttgttgtggagtaaatttgattaaattaatgtattattttttaaggtagagttttgtaagttattatatttgttttttttatatttaaaaattttaagtttggttatgggtaagggttattattaattttttttaggtgaaatgttatttatagataatttagttaggtgcggtggtaggtgtttgtaattttagttattaggggaggttgagataggagaatcgtttgaatttaggaggcggaggttgtagtgagttgagattgcgttagtgtattttaatttgggtaatatagtaagattttgttttaaataaaagaaaataaaataaaataaaattttttttgaaaaaattaagaaataaatattttttaatttgtttagattttatttaaattatttgtttgtaaattttttgatgtttagaaaataaatatttttatttaattttattggtaatgaaatgaaaagtaatatattaaaaaaaaaagatgatgttttgattttttaaattaatattatgtagtttaaagatgttattgagggtcggttgggtgtagtggtttacgtttgtaattttagtattttgggaggtcgaggtgggtagattacgaggttaggagatcgagattattttggttaatacggtgaaatttcgtttttattaaaaaaataaaaaaattagtcgggcgtggtggcgggtgtttgtagttttagttattcgggaggttgaggtaggagaatggtatgaatttaggaggtgaaatttggagtttggatttgagatcgtgttattgtattttagtttgggcgatagagcgagattttgttttaaaaaaaaaaaaaaaaggttattgagggttatatagtgttagtgggaataaaatttttagtataattttttggaaagtagaaattttattataattatgggaatagttatatttttaaggatttaaattttttgggaaataaagtagggtataaataagtaaataaaatatggatagatttttgtattttttgtaatagtaatataaattcgaaataaacgatataaaaaaagtttaattgaattaaaaattgtaggataaaatgaaaatatgttattatttatgaaaaagaaaaattggatataaatttttttaaatagtataaataaaattttgttaaaatatgtttaaaagagtggaagaaaatataatggaataaaatttagggtggtgatatgtgtaaaaattaattttttaatttttttaaatatagaatggtatttttataattataaaaatagtttaaaaataaaataaaattgggtatagtggtttatatttgtaattttagtattttgggaggttaaggttagagattatttgagtttaggagtttaggtttagtttggataatttagtgagattttgtttttataaaaataataataataataataataataaattagttaggcgtgttggtatgtgtttgtagttttagttgtttggaaggtcgaggtgtgtggattgtttgaatttatgagtttgggattatagtgagtaatgatttaattattgtatttttgtttgggtaagagtgagattttgtttttgaaaaaaaaaaaagaggagtagtgtgaagaagaggcgagaacgattttcggatcgattaaagttcgcgtgtcgttgtattttacgtttagtatttacgttttgtcgttatcgttattatgtttaagagaaaggttgaaggggatgttaagggagataaagttaaggtgaaggacgaattatagagaagattcgcgaggttgtttgttaaatttgtttttttaaagttagagtttaagtttaaaaaggtttttgtaaagaagggagagaaggtatttaaagggaaaaagggaaaagttgatgttggtaaggaggggaataattttgtagaaaatggagatgttaaaatagattaggtatagaaagttgaaggtgttggagatgttaagtgaagtgtgtgtatttttgataattgtgtatttttggtgattgtatagtttgaaatatttttattaagttttataaaaatgtagaattttgttttatttttttttttttttttttaagttatgttgttcgtatatagaatattttattgttgtttttgggggaaggggtatatgttattaatagaatgtttttaaaattggattgatgtggagaaaatattttttttttttagttttgagagatttttttttggtttttaggaggagggattttttgattttgatatatatggttattttggtataaaagttttgtgttatggaaaaataaatttgtttttatgtttttttttttttttttacgttttagtatagatttaatttttttaagtttagatatttgttgagatttgatttttagttattggttattagtgtgttaggtaatttggattttttagtgatgttattgagatggtatttgttaaaagagtagtggttttatttttagattgtggatttttagataaattttgttattttcgttttattttttgaaagttagggttggtttgtgaaaagttgttaaataatatgttaaatgtgaaatgttaatttttatttttaattttttttgtttagagtattagatgaagattttattgggttttatagtggttttttgatttttggtagtttattgaagaagggagtttgaaagttgttgtatattgttaacgattgtttgtttatgttttgtttgaaatattatgattgtttatggaaagtatttttaataaagttggatatagtttggtttggaaaaaaaaaaaagaaagtaaataaaataaggatttgtaagtaaaacgtatttggtatataaagtattgtagttttaatatttatatttattattttattataaatgtttgtaataataatagttgataatattagtaatgttttattattttttttaattatttgtgtatttgttagtttaatgattaaaagagttggaatggagtaagaaagggttgtggttaaagtcgagttttgttatttgtttattgagggttattaggaagtttagattgaagaaattggaaaggatttacgtaatgattatttaagttttaggttatttaattgtaatatggatattatattttttattttagagtatgattgggaggatttaatgatattgtatgttatgtaatttttatatgaagttaagagttttttaaacggtgattttttttattaaaagaattggtggaataaggatatggttattggggtttttttattaaattaaaagaatgggataaattgttaattttttattgataaaaagttttatttttattgaatgagtgaattagaatttatttattttagaggtgtaatttttaattttatttaagttagttttgaggttatttatttgtaatttgataaatatttggttttttttttgttagtttttttttggtaatattagttattggtttaaaaatggttataggttttagaaatttagttggagagaaatttatatgaaaaatagtatattttatatttttttttttttaaatatattgacgttaaagggtattaggttagtttgtagaaaataaattattttttcgaagaattatttttttataagttggaaattttgtttgaataggttgagcggataaattttttttgttttttcgaagattttttttggagttgcgaagatttttgaatttttagaagttagtacggttttcgtttgttgtttttggaagtgtatattgtatattg

SEQ ID NO: 72 - DNA, 7089 bp, Artificial Sequence
  chemically treated genomic DNA (Homo sapiens)
tagtgtatagtatatatttttaaaaatagtaggcggagatcgtgttgatttttggagatttagaggttttcgtagttttaagagaaattttcgaaaaagtagagaggatttgttcgtttagtttgtttaaataaagtttttagtttatgaaagagtggtttttcgagaaggtagtttattttttatagattaatttaatattttttaacgttaatatgtttaagaaagaaaaggtataaaatatgttgttttttatgtgaatttttttttagttggatttttgaggtttgtaattatttttggattaatagttgatgttgttagagaaaagttggtaagagaagaattagatatttattaaattgtaagtaagtagttttaaggttaatttaaatgaggttgggagttatatttttaaagtgagtgagttttgatttatttatttaataaaaataagattttttgttagtgaaaaattagtagtttattttatttttttaatttggtgagaaaattttagtgattatgtttttgttttattaatttttttaatgagaaaagttatcgtttaggaaatttttggttttatatgaaaattgtataatatataatgttattgaatttttttagttatgttttgaggtaaggagtataatatttatgttatagttgagtagtttgagatttggatggttattgcgtggattttttttagtttttttagtttaaattttttggtggtttttagtgaataagtgataagattcggttttgattatagtttttttttgttttattttagtttttttagttattaaattgataaatatataaatagttaaaaagggtaataaaatattgttaatattattagttgttgttattgtagatatttataataagatagtaagtataagtattgaggttgtagtgttttgtatgttaaatacgttttgtttatagatttttgttttatttatttttttttttttttttttaagttaaattgtatttagttttattaaagatattttttataaataattatggtattttaggtaggatatgggtagataatcgttaatagtatataataatttttaaatttttttttttaatggattattaaaaattagaaagttattataaaatttaatgaagtttttatttgatgttttgaatagggaaagttgagagtgagggttgatattttatatttagtatgttgtttaataattttttataagttaattttgatttttaggaagtgaaacgaaaatggtagaatttatttgaagatttataatttagaaatggaattattgtttttttgataggtgttattttagtggtattattggaaagtttagattgtttgatatattggtaattaatgattaggggttaggttttaatagatgtttgggtttaagggagttaagtttatgttgaaacgtggaaagggagaagaggatataaaaataaatttgtttttttatagtataaggtttttgtgttaaggtggttatgtgtgttaaagttaaggaatttttttttttgggagttaagaggaagttttttaaaattggaagggaaaggtgttttttttatattaatttagttttggagatattttattagtgatatatgtttttttttttaaaaataataatgaagtgttttgtgtgcgaataatatagtttaaaaaaaaaaaaaaaaaagtaaaataaaattttgtatttttataaaatttgataaaagtattttaaattgtatagttattagaaatatatagttattaaaaatgtatatattttatttggtatttttagtatttttagttttttgtgtttggtttgttttggtatttttattttttgtagggttatttttttttttgttagtattagtttttttttttttttttttgggtatttttttttttttttttgtaggggtttttttaggtttgggttttggttttggaggagtaggtttagtagataatttcgcggattttttttgtggttcgttttttattttggttttattttttttagtattttttttagttttttttttgggtatggtggcggtggcgataggacgtaggtgttggacgtgggatgtagcggtacgcgggttttggtcggttcgggggtcgttttcgttttttttttatattgtttttttttttttttttttagagatagagttttatttttgtttaggtaggagtgtagtggttagattattgtttattgtagttttaaatttatgggtttaagtagtttatatatttcggttttttaagtagttaggattataggtatatgttaatacgtttggttagtttattattattattattattattatttttgtagaaatagggttttattaggttgtttaggttgaatttgagtttttgggtttaagtgatttttggttttggttttttaaagtgttgggattataggtgtgagttattgtatttagttttgttttatttttaaattgtttttgtaattataaaagtgttattttgtgtttggaaaagttggaaagttaatttttatatatattattattttaaattttattttattgtatttttttttatttttttaagtatattttggtaaagttttatttatattgtttagaaaagtttatatttaattttttttttttataggtaatggtatatttttattttattttgtaatttttggtttagttaggttttttttatatcgtttgtttcgaatttatattattattataaaagatatagaaatttgtttatattttgtttgtttgtttatgttttgttttgttttttaaaggatttaaatttttaagaatatagttgtttttataattatgatgaagtttttgttttttagagagttgtgttggggattttgtttttattggtattatatgatttttagtaattttttttttttttttttgaaatagagtttcgttttgtcgtttaggttggagtgtagtggtacgattttagatttaggttttaagttttattttttgggtttatgttatttttttgttttagtttttcgagtagttgggattataggtattcgttattacgttcggttaatttttttgtttttttagtagagacggggttttatcgtgttagttaggatggtttcgattttttgatttcgtgatttgtttatttcggttttttaaagtgttgggattataggcgtgagttattgtatttagtcgatttttagtaatatttttaaattgtatagtgttaatttaaagaattagaatattattttttttttttaatatattgttttttattttattgttaatgaagttgaataaggatatttattttttgaatattagaagatttgtagataaatgatttgagtaaaatttgagtaagttagaaaatgtttattttttagtttttttagaagaagttttgttttgttttgtttttttttgtttgagataaggttttattgtgttgtttaggttggagtgtattgacgtaattttagtttattgtaattttcgttttttgggtttaagcgatttttttgttttagttttttttagtggttgggattataggtatttgttatcgtatttggttaagttatttgtagatgatattttatttgaaggaagttggtggtaatttttatttataattaaatttaggatttttagatatgggaaaagtaagtatgatgatttataaagttttgttttaaagggtaatatattggtttaattaggtttattttataatagggaatttaggtagtttagttttatattttttttgagtttaatgatagttttttgagttgaggagttagtagtattttttttttagttaaaatttttagttgatttttttttttaattttttagtgtttattagatttgaaattttgttttgtttgtttatggtgttttgttttatggtagttttattttttaaaattatttattttgaattttagtgtgatttgtttttttagatttttgtttttgtttgatttttgaaatattaaagttttttttttttttttaaattttttttgtgattagagttataaacgttgttgtgttttgagatggttggttggaaattagtttaagttgtatttggtatagtatatattagtgaagataggttgttaggatgaagttataggttgttttatagttatagatgaatagttttttgtttttaggttttttttttattgatgtaattaaggtttttaatttagaattttttaggtaatttattatagtattattatcgatggttgatggatatgttaaggtattgattttttaagttagtagtggttggttagagtttggtaaaggagtagtttttttagtttattttagtgtgttatataaataatattttttttggatgttatagtgtgaaaaagggtgggaagtagtgttttgttgagttatattagagttttaggtaaaagaaaaaaatgtgtatttttgtatatttttttttttttaatggttaagtttttttttagaatattaaagtagttgaaaaaatagtgaaaaaaaaaaagggaagtatgtatattaaaatttattttaagtattgtatgtataagatagtttttataaataaagtattatttagttcggtatattagttgtggttagtagttgagaaatttttgtttaattagtgaaaatttgatgttttatttttgttttgatataatgaatagagagtgaattacgagacgttggaattgattaacgtagttttggtattattcgtttgtatataataaagtaaattatagattaagtaagttattaaaatttgatttattttattatgttattgtggttttgagtgggatgggatttggttaatttgaaagtagaaggtagtttttttgagattattattgatatattataagaaaattaagtttttattgaaaagtattataatgattatttttaagagaatagttattgtaggtattagaagatgattttttattattataaaataagtgtatgatttttagatgtaattaatagattgtttatatattatattagtataatttaagttgtagtttgttatttatatttataaggaatgttaggaatattaaatttttaaatatttttattttaattgtacgtggataatattgttagattgcggtgttagggttaagttttaaaagtgagttttatagaaaggtttttagaaatttggttagaaatggaattgagttaatttataattagttttttaatatgtgtttttgagatattagaatataaagagatttgttattattgaaatatagtatagatttttgattttttttgaatgtgatggggtgttttgttttgttttggtttgtatttgtttttgtttttgaggtagggttttgttgtgttgtttaggtgggattgtagtggcgtgatttcggtttattgtagtttttattttttaggtttaagtgatttttgtgttttagttatttaagtagttgggattataggcgtgtattattatgtttggttagtttttgtatttttagtagagatagagtttttttatattggttaggttggtttggaatttttggttttaagtgatttatttatttcgattttttaaagtgttaggattataggcgtagcgtgagttattgtatttagttgaatttggtgatttttaattaatgatgttttgtgtttttgtatatatttttttttttgtttttaggataaatatgttttattagatgtaatattaaatgtagttgatcgttttaattatgtttagtggtatttaattgttgtattttttaattttgattttaagtaaggagtaaaaataatgagaatgaggttatgtttagaatttcggaaaagtgttaggaagttatacgagcgattttataaatttcgtaaaaataattattatttttttataagtgagtatgttaataaaggtttttttttagtttataatgtttgggtaatattaagtaggttaaaatgttacggtgtttaaatattaaaatttatatgatatttttttggaaagttttttgttgtgttaatatttgttgtttggttaaaagaaaatatatagtagtaaaatagaaattttaaatgtttgtatttttagatattattttttagtaatgacgatttagttgtaagtagggttgaattaattttgatttttggtagtgttttaattataaaattatatcgttaatttatttttagttataattaatttaaatttaatgaatggatgggtgggtttggtgcgtttgaaagaagtattttataatagtaaaacggttaggcgcggtggtttatatttgtaattttagtattttgggaggtcgaggcgggcggattatttgaggttgggagtttgagattagtttgattaatatgtttttattaagaaaaatataaaaattagttaggcgtggtggtgtatgtttgtaattttagttatttaggaggcggaggtaggagaattgtttgaatttaggaggtagaggttgtagtgagtagagattgcgttattgtattttagtttgggtaatacgagagaaattttattttaaaaaaagaaaaaaaagaaaaagaatcgggaggtagtttttatgggttcgtgtgcgtggtatggatggagaggggtagtagagagttagtagatagagttgtgaatattgttgggcgaggtggttttgtgtagtttaggtaggtttttgagaagaagagggagttttttgtttggagttaggttgtagggtgtaatgtattaaaatggtggatttgttaagaatgatataaagattatataaaggaggggcgaggatggttatgaatattattatgttgggatataattttattttattataaaaaatatttttatttggggaaaatttttatatcggattttttaaaagtaggtataataagattgtagtaaaattaaaatttttggatgtatatattatttttttttttagaatt

SEQ ID NO: 73 - DNA, 7153 bp, Artificial Sequence
  chemically treated genomic DNA (Homo sapiens)
aattaataattttaagaattatttttaatttttgaagttgatatattatgaatttatagtaatgttattataattgggtaaagaaaaaaattttattgattaaatatttaaaagataattaagatatttgtaaaatataagtaaatgtgataagagatatttaatattgtataagtattttaatataattatttttaaatattttattaaaaagttaagaattttaggggaaataaaataattgttaatatatatttgttatatagattttattatttaataataaagtagaaagtaggattgatttaggatatagatataatttttataattgtatgttttaattataataaaaagatgatgtgtaataggttattttttttatagattagaaagagaagtttattaaaatgtttaattaaatggaaaaatattatgtaagatttatattataaagtttagattggatattaataattgagatttttaataatttggtaaattatattaatggtatttagttttttagataatttttaaggtttttattttttttttgtttaggaaattgggtaattatagttataagtaggtagaagtagtttagaggtagaggttagtaagggtagtataaatttttatgtgtaaagaatagtttttgattttaaagaattttattgtttaagaaaataataataaatttggaaaattgttttttaaattatatagtaagatatgttcgggttgggtgcggtggtttatagttgtaattttagtattttgggaggttgaggtaggtggattatttgaggttaggagtttaagattagtttgattaatatggagaagttcgtttttattaaaaatataaaaaaattagttgagtttggtggcgtatgtttgtaattttagttattagggaggttgagatagaagaatcgtttgaattaaggaggtagaggttgtagtgagtcgagattgtgttattgtattatagtttgggtaataagaacgaaattttgttttaaaagaaaagaaaaaaagatgtttaaaattggtaattttagtattttggtaggttaaggcgggtggattatttgaggttaggagatttagattagtttgattaatatggagaaattttatttttattaaaaatataaaaaaattagtcgagtttggtagtatatgtttgtaattttagttattcgggaggttgaggtaggagaatcgtttgaatttaggaagtagaggttgtagtgagtcgagattgcgttattgtattttagtataggtaataagaacgaaatttagttttaaaaaaaaaaaaaaggtatgtttatattatattatttattttttttattttttagaattaaggatataattataaataaggataaagaaaagttatatatttaaggagataatattttcggtattgtgatttgatttttataaattaagtgaatatattaaattattatatatattttaaaattatgtatattttttatgtattaataagtaataaaataaataaagataaagatttatgtggtagagagtttattattgagtttttatattttgaaaaaaataaaatgtttaaaatgggaaaaaaagttaaatatatagtattattattatgaaatgaaaagttatgaaatttttaaagaaattatttttaagaattatttaatgataaagaaatatatttatattttgttgggaaaaagaatatatataaaattatatatagtttaatttttattaattttataattaggaaaaaatatttttaagaaagttgattagtattgtatgaatgataaatttggttgattatattaatttgtattttagatttgtattgttaggaattgaataaaagaaaataaagtgggaaaattttattatttattacgaaggtttaggtatatttgatttatagattaatttttagttagttttatatattttaatttttttttaataaaaagcgaggtaggagtgttatttttttggattttacgtgtgttattttgataatagttgagatttaaaagtattaacgaatatttaaatttattttatagttttattatttttatttaaataataaaggtaagtttatattttaatttattgaggatgagtttaaggtaattttggaatttttgagaagatatttcgaaaattagggaggaaaaatttatatcgtatatgattgaaattagaagaagtaattagaggagatttttatggattttttataatttaaagtaaggaaaagatagaaagagaatttggaattttattttgttatgtgattttggatatgttttttagttttttttagtgttagtttattcgtttataaaataaagataattaataatttgtttaaagaattttaaaaagtattaaattgttagtataacgtttagtatatagtggggaatttaggaaatagtagttataaatattattttaaataataatgtagttggatagtgtatatttttaattatattagtttatttaaagtaaattttttatttaagtaatattgggtttaaatttattgagtttaaagtgattattatattattatattattgtattaattatataagattggagttaatgaatgtattgttaagtttttgaatgaatataggtataaaattattgggttgaaaagttttaattttaaatagagaataaaaggatggagaaaaaagatttttttgttatttaaagagtaaatttaaaaattaaaaagacgtaaagaagaaattaaatggggggaaaaatagtaattattttataatggtatttagaggggatgaataatttatattagtcggggtttagtttggataatgaaattgggaggaagaggtttttttttttgtttttgtttttgtttttgagatagggtttcgttttgtcgtttaggttggagtgtagtggcgcgatttcggtttattgtaagattagtttttcgggtttacgttatttttttgtttcggttttttgagtagttgggattataggtttttgtaattatattcggttaatttttttttttgtttttttagtagagacggggttttataatgttagttaggatggtttcgattttttgattttgtggttcgttcgtttcggttttttaaagtgttgggattataggcgtgagttatcgtgttcggtcggaagaggtttttatatagggttgtttatttgtgatttttatttattattttttattaagaaaatgatgattgtaatataaattttaatttgaaagaaagtatagtattattattatcgtatcgttatttgtgtatattagtgttagtgatatgttttaggttttaaatgataaatttaattaaatgttgtaaatattaattggcggattaaatttttataatttaagtattttaagtttttatataaatttattagttttgaatatttaataaaattttgaattttgtgttttagaattgaaatgcgagttaagttttatttatttaataagattatatattttttatggtggggattatttaaaaaattatattattatttaaagagaatttttataaattttataatttcggatattatgttttaatagtatgtgttaacgtatttttttagaatgtaaatattggtgtttgttatgaaatttttagtgcgttttaataagagtttttttttaattagttaagtaaaagatgttgggtggatgtaattatggttatttaaaagaatgttggtatatatgttttgtaaattatttaagaaggaaatattataataggaatgaattagtataaatttattaatattaaaatatatgtatgtattcggttaatggtggatttcgttttatgtgtagattatgatatttttatgttttaaaatgagtttgggattgtgggcggaggttggaaggttgacgagtaaggatgtggaaagcgggtattattagggttggagattttttagggttgttatcgattgaaagtgattttatgtgttttaataaaggaagttatgaaagtttggtataggagttttaaaagtaaggaatcgaatataatgtaagtgtgcgttgaattcgttagaataggagtacgtttgagggtaagggtttttgtttgtttttattattgttataaggtaggcgttttgaatggaacgtggaggtttgtaacgtatttagcgatacgtatttattttaggagataagggtaatatatattgtttaaaaattttatcggaataaattatagcgacgatattataaaatatttttattttaggttttattatttaagaggaaagttttagaatcgagagttttgtgaaatcgtttgtgttttttcggcgagaagttttttagtatttttaggttcgtttcgcgttttttcggttttcgtttcggcgtaaggtaggtcgagaatcgttagttgcgttttcgggttcggttttgattgacgggcgtttcggattattataaataacgggttttcgaagcgtgggttcggtttagcggacgtagacggttcgtatttatcgcgtcgtagttcgttttatagtttatagattatagttcggggcggggtaaggggtttcgggtacgagtgtgggttgtgaaaatacgggtataagtttgggtcgagtatcgatttgggcgtttcgtatttttttcgcgtaatatcggtttttgggtagcgtaattgtaaggataggaatcgtcgcggcgcgtttttagttttttttttattttttttcgttcgatttgtcgcgcgttcgcgttttttttttaattttaaaggattttttcggggttggaaaacgtttttttttcgttttttttttgtgcgcgtgaattaggtagttgttagatttcgcgagaggttcgttttttagtcgtttttttttttagttagtgagtgcgcgaacgagaaaggaggagggcgttttaggcgatagtattgtagacgttattattttttgtttttttgttgtatcgatttcgacgttttgtttgtgttttatttgttcgcggtttataggtaattggagttattggagtttgggtattgttgattcgggtaagggttggggttttttgaaaggttgcgtttattttttttaagttcgggttttttcgagtttttagtggttttttagttcgaagggaggcgttggcgggaggcggggttgtcgtttttttcgtcgttttgattgacgtggtttcgggttaatcgtttcgttttcgtattatcgttgaagttttggtagttaatagggcgcgacggcggggaggacgcgagaaggcgggggaggggagtttgcgttcgttttttgtttagtttcgatcggttgaggcggcgcggtagcggagggacggtagtttcgcgcggtgaggagtcgggttgggggagcggttcgtggaggtgagggtcggagtttagttttttcgtttgagggaggcgttttgggagtcgttttggtgtttggtcgttttttcgagtgggaacgttgttcggtgtttttttttttattttcgttatttttttgagcgtgtattcgtagttcgcgttgtggttttagagatttggggattcgtgaggtatgtgtttttaggatgagttggagttatgtggtattgggaattagggatttcgtggaggaaaggaggtcggtgcggggagaaggtcgcgtcgtcgttttttttgtgtgagtttcgttttattttgggtttttcggttcggggtcggagttggagcggcggggatggaacggttagggttgtttcgatggttttgtttcgggtagtggggggaggatgcgggggatgagatttcgggatcgcgtggtgggtgggggagggggtcggcgttcggtttcgtttagtagtacgtagtcgttattacgcgggtcgttattttttgtcggattcgggtgaggagaggtgcggtgtttttgttgtcgattttcgttttttttcgttttgttattcggttgtttttgatttcggtgtcgggaggcggggaggggagggcgcgttggcgttcggttagtggagtatatatttagcggatttttgaggtttggggattagtgattgtaggattcgaagggtgaacggtaagcggtaacgttatttttatagataagttttgttgtttttgtttaaatttttttatttaattttttttttattatattttagaaattgcgtgttgggtcggaaggatgtcgttttagttgtcgttaggagagtaataagtcgattaacggtatgggagaatgggaggtataaatgtgtttcgtttgttggttttttgttgtttagttaattttttagtagaggtcgtttgttaatttttagtttcgataagagggaagtttaaaaaggttgtttgtagttttatcgatcgttttggtacgtagatattttagttttcgtgttataggtatgattgttgtgttgtatttttttaagtttaatttaaaataattcgttagtgattgttagtttttaagggttttatttgtttcgttgattaataatagattggtattgtggtagtttgggtttggttttatattagatttttggatttattttttcggtagattgttttggttgttggatgtgttcgtaattgtcgttgtatttgtaaattttagagatgttatataagatcgttttaagtatgagtcgaaagaaataggaaagtaattggaagttttaatataaaattagtttttttagtgaataagatgtattgtaattttttataaatgtatgttttgtggatgatatttatttttttagggttttgggaatgtgtcgtataaaataatttattgttgtggtgggatttaatttagtggttaaaagttattgttttaatttagtaaaaaatgaaattaggtttttttgaattttgtattttttaggtagttatttgaattgtgaaattttaaaatgaagaattaagttttagaaatagttggttttttgggtttaaattagtatttattgtgatcggaaataaatatttagtaataagaataaataaaagtaaaattgatttgtgttggtttttatagg

SEQ ID NO: 74 - DNA, 7153 bp, Artificial Sequence
  chemically treated genomic DNA (Homo sapiens)
tttataagaattaatataaattagttttgtttttgtttatttttattattgaatatttgttttcgattatagtgaatattgatttgaatttaaaaaattagttgtttttaaaatttgattttttattttagggttttataatttaaatgattgtttaaaaaatataaaatttaagggagtttggttttattttttgttaagttagaataataatttttagttattggattaagttttattatagtaatgaattgttttatacggtatatttttaaaattttgaaaagataaatgttatttataaagtatatatttatgaaaagttataatgtattttatttattgggaaaattaattttatattaaaatttttaattgtttttttatttttttcgatttatgtttgaagcgattttatgtgatatttttaaagtttataaatataacggtaattgcgaatatatttaataattagaataatttatcggagggataaatttaaaaatttaatataggattagatttaaattattataatattagtttattattaattagcgaaataaatggagtttttgaaaattaatagttattagcggattattttaaattaggtttaagggagtataatataataattatgtttgtaatacgaaaattaaagtgtttacgtgttaaaacggtcgataggattataaatagtttttttaagttttttttttgtcgggattaggagttgataagcggtttttattagaaggttggttagatagtaaagagttaataagcgaggtatatttatgttttttatttttttatatcgttggtcgatttattgtttttttaacgataattgaaacgatattttttcggtttagtacgtaatttttgaggtgtggtgggagaagagttggataagaaagtttaagtaaaaatagtagggtttatttgtaagaataacgttgtcgtttgtcgtttatttttcgggttttgtagttattagtttttaggttttaaaaattcgttaagtatgtgttttattggtcgagcgttaacgcgttttttttttttcgtttttcggtatcgagattaaaaatagtcgggtaataggacgggaaaaagcgaaagtcgatagtagaagtatcgtatttttttttattcggattcgataggaaatggcggttcgcgtaatggcgattacgtgttattaggcggagtcgagcgtcgatttttttttttatttattacgcggtttcgaggttttatttttcgtattttttttttattgttcgagataaagttatcgaggtagttttgatcgttttattttcgtcgttttagtttcgatttcgggtcgggagatttaaggtgaggcggggtttatataaagagagcggcggcgcgatttttttttcgtatcggtttttttttttttacgaggtttttagtttttagtgttatatagttttagtttattttagaggtatatgttttacgaatttttaagtttttaggattataacgcggattgcggatatacgtttagggaaatggcggaggtgggggaggggatatcgggtaacgtttttattcggagaagcggttaaatattaaagcggtttttaggacgttttttttaagcggaaaaattgggtttcgatttttatttttacgagtcgtttttttaattcggttttttatcgcgcgagattgtcgttttttcgttgtcgcgtcgttttagtcggtcggagttagatagaaaacgagcgtaggtttttttttttcgttttttcgcgtttttttcgtcgtcgcgttttattggttgttagggttttagcgatggtgcgagggcgaagcgattggttcgaggttacgttaattaaggcgacggaggaggcgataatttcgtttttcgttagcgttttttttcgggttgggaggttattaagggttcgagaaaattcgggtttgggaaaagtaaacgtagttttttagggagttttaatttttattcgaattagtaatatttaagttttaataattttaattatttataggtcgcgaataagtgggatataggtaagacgtcgaggtcggtgtagtagagaaatagaggataatggcgtttgtagtgttgtcgtttggagcgttttttttttttttcgttcgcgtatttattagttggggggaggggcggttagggggcgaatttttcgcgagatttaataattgtttagtttacgcgtatagggagggggcggggaaggggcgttttttagtttcgaaggagttttttggggttggaggaggggcgcgagcgcgcggtaaatcgggcgggaagaggtaaaaaaggaattgggagcgcgtcgcggcggtttttgtttttatagttgcgttgtttagggatcgatgttgcgcgaggaaaatgcgggacgtttaggtcggtgttcggtttagatttatgttcgtgtttttatagtttatattcgtgttcgaagttttttatttcgtttcgggttgtggtttgtgggttgtgggacgagttgcggcgcggtaagtgcgggtcgtttgcgttcgttgggtcgggtttacgtttcggaaattcgttgtttgtaatggttcggggcgttcgttagttaaggtcgggttcgggggcgtagttggcggttttcggtttgttttgcgtcggggcgggagtcggggaaacgcggggcgagtttgggagtattggagaatttttcgtcgagagggtataggcggttttatagggttttcggttttgagattttttttttgggtaatgggatttgagatggaagtattttgtagtgtcgtcgttgtagtttatttcgataaaatttttaggtaatatgtattgtttttgttttttaaaatgaatgcgtatcgttgaatacgttgtagatttttacgttttatttaaagcgtttgttttgtggtagtgatgaaaatagataaaaatttttgtttttaaacgtgtttttgttttagcgggtttagcgtatatttgtattgtattcggttttttatttttaaggtttttgtgttaagtttttatgattttttttgttaaggtatataaggttatttttaatcggtgatagttttgggaaatttttagttttggtagtattcgttttttatatttttattcgttaattttttagttttcgtttataattttaaatttattttgaagtataaaggtgttataatttgtatataaagcgaaatttattattggtcgaatatatgtatatattttagtgttgatgaatttgtgttgatttatttttgttataatgttttttttttgggtaatttgtaaaatatatatattagtatttttttaaatggttatgattgtatttatttagtattttttatttgattgattagaggaaaatttttgttagggcgtattgaggattttatgataaatattagtatttatattttgggaggatacgttaatatatgttgttagaatataatgttcgggattgtggaatttataaaagttttttttaagtgataatataattttttaaatggtttttattatgaagagtgtatagttttgttgggtaggtaaaatttaattcgtattttagttttaaaatataaagtttagaattttattaaatatttaaaattgatgagtttatgtaggggtttaggatatttggattatagagatttaattcgttagttagtatttgtaatatttaattgagtttgttatttaaaatttgagatatgttattgatattaatatgtataaatagcggtacggtaatgatgatgttgtgtttttttttaaattaggatttatgttgtagttattatttttttgataaggaatgatgagtgggaattataagtaagtagttttatataagaatttttttcggtcgggtacggtggtttacgtttgtaattttagtattttgggaggtcgaggcgggcggattataaggttaggagatcgagattattttggttaatattgtgaaatttcgtttttattaaaaagataaaaaaaaaaattagtcgggtgtggttgtaggagtttgtagttttagttatttaggaggtcgaggtaggagaatggcgtgaattcggaaggttgattttgtagtgagtcgagatcgcgttattgtattttagtttgggcgatagagcgagattttgttttaaaaataaaaataaaaataaaaaaaaaaattttttttttttagttttattgtttagattggatttcgattggtgtaaattatttattttttttagatgttattgtgggatggttgttatttttttttttatttgattttttttttacgtttttttaatttttaggtttgttttttaaataataggaaagttttttttttttatttttttattttttgtttgaaattaagattttttaatttaataattttatatttgtgtttatttaagaatttaataatatatttattgattttagttttgtgtaattggtataatggtgtaatggtgtagtgattattttggatttagtgaatttagatttaatattatttagatgggggatttattttagatgggttaatataattgagaatgtatattatttagttgtattattgtttaaaatagtatttataattattattttttgagttttttattgtgtgttaaacgttgtgttggtagtttaatattttttagagttttttgagtaagttgttagttatttttgttttgtgaacgaatgaattagtattaagagaagttaaggaatatatttaaggttatatagtaaaatggggttttagattttttttttgttttttttttattttaggttatggaggatttataaaaattttttttgattattttttttaattttagttatatacggtataaattttttttttttaattttcggagtatttttttaaaaattttaggattattttgaatttatttttaatgaattaaaatgtagatttatttttattgtttagatgaagataatggaattgtggagtagatttaaatattcgttagtgtttttaagttttagttattgttagaatgatatacgtaaggtttaaaaggatgatatttttgtttcgttttttattaaaaaaaaattggaatatatgaggttgattgaaaattaatttgtaaattaaatatgtttagattttcgtggtaggtgataaaatttttttattttatttttttttgtttagtttttggtagtatagatttagaatgtagattagtgtggttagttaagtttattatttatataatgttaattagtttttttaaaaatgtttttttttgattataaaattaatggggattaagttgtatgtaattttatatgtgtttttttttttaataaaatgtgaatgtatttttttgttattaaataatttttaaaaatggtttttttaaagattttatagttttttattttatggtggtagtgttatgtatttaatttttttttttattttgaatattttgttttttttaaaatataaaaatttagtggtaaattttttgttatataaatttttgtttttatttattttgttatttattgatgtataaaagatgtatatagttttggggtatatgtgataatttaatatatttatttaatttgtaaagattaaattatagtatcggggatattatttttttaaatatatggtttttttttgtttttatttatgattatgtttttaattttggaaagtaaaagaagtggataatatggtatgaatatattttttttttttttttgagattgagtttcgtttttgttgtttatgttggagtgtagtggcgtaatttcggtttattgtaatttttgttttttgggtttaaacgatttttttgttttagtttttcgagtagttgggattataggtatgtgttattaagttcggttaatttttttgtatttttagtagagatggggtttttttatgttggttaggttggtttggattttttgattttaggtgatttattcgttttggtttattaaagtgttgggattattagttttgaatatttttttttttttttttttgagataaagtttcgtttttgttgtttaggttgtagtgtaatggtataatttcggtttattgtaatttttgtttttttggtttaaacgatttttttgttttagtttttttagtagttgggattataggtatgcgttattaggtttagttaatttttttgtatttttagtagagacgggtttttttatgttggttaggttggttttgaatttttgattttaggtgatttatttgttttagttttttaaagtgttggaattatagttgtgagttatcgtatttagttcgaatatattttattgtataatttaaaagatagttttttaaatttattattatttttttggatagtggagttttttaggattaggagttgttttttgtatatgggaatttgtgttgtttttgttaatttttgtttttgagttgtttttatttgtttgtgattatggttatttaattttttaagtaaagaagggatgaaaattttaggaattatttgaaggattagatgttattaatataatttattaaattattaaaggttttaattattaatatttagtttaaattttataatatagattttatataatatttttttatttgattaaatattttaataagtttttttttttaatttgtaggaaaaataatttattatatattatttttttattataattaagatatgtagttgtaggaattatatttgtattttagattaattttattttttattttgttgttaagtgatgaaatttgtgtaatagatgtatgttagtagttattttattttttttaaagtttttgattttttggtaaaatatttgagaatagttgtattggaatgtttgtatagtgttaagtattttttattatatttgtttgtgttttataggtgttttggttattttttgggtgtttagttaatggaatttttttttttgtttagttatgataatattattgtaaatttatagtatgttagttttagaagttgagagtggtttttagagttattaatt

SEQ ID NO: 75 - DNA, 5666 bp, Artificial Sequence
  chemically treated genomic DNA (Homo sapiens)
tttttaaatattgtttagaattattatatagaatataaatttgtacgatgtttgtaagattttattttagtgggttttttttttttttgatttttgtttataatttatatttgtgtagtaaagtgtttattgtttcgaaaatttgtaggtagaatggtttttttgtttatttgggatttttagtcgtttttagaatagtttgattagatttttataaaaataagtttatagggtattagttagttattttagttttgtttttttatgtttttggtatttttagatttgaaattgatttagagattatgggggttggaaattaattaggtatatatatatattgagtaggtcggagaattttaatattttttttatttttttgtttaaatgtttatgaatgtgtagaaggtgtatgttatttttttgcgttattagtatttaaatttgtagttgtgaattttgaatttaggttttgaggttttttaggatgtgtgagagtagtttttttgaagggttgttttttttagttttttttatagtaatatataagaattgtagagttaggttgattttatttggggtttgtatataaaggttggtttttatttgggatttataagatagggttagattttggatttaggatatatagaaaatttaggggatattttttgtattgtgagagattaatatggattttgtaaagttttatttttggagtgaggtttttagagtttttaagattttgtttagtgagttatagtagttttgtgagtggtttttttttataaatagaatttcgtggtagaatttgtaagtgtaaagtagtattttagtagagggagggtggggttattattgtttagagttatgagtaaagttatgtttatttgtgagttgtgttattggagtagggtaattttgtttttttttgtatttaagagttagttgattaggtataggtaataatatatttggattttggatttgtggttttattatgataatttaattttttattttggttttataaggataatttgagttttttttgtttgaattattattgggtttttattatatagttattagggatttttttattagtatttaggggatatttggttatatattttgtgtaggtaggggataggttgataacgggttaattttgttttcgttttagagggagaagaatgagttattagggtttgttttttttttaatagaaggaatttttttatttggtatttaagtgggagttgttttagttttttaatgtgtgggtgaaatataaggaggagttttggagatttatattgataggtaaattaattgtttttattttatatggttattaggaaaatagatgtagtagttatagtttttattatttaggaatttttagtttaaagtagacggataatggttgaatttaatattatgtggttaggagtaagaatggaggtgtatagggaatttgggtttgatttgggatattgtttttatgttgacgttgtgaattttgatgttattattcgaagggttattcgtggataaaagagttgttattataattattatttatattgatttttttttgttaaagataattatgtagttattaatataattttcgtagaaagttttatatgttttggttaaattgtttgttgtatgttataaaataggatgaagtttaaattatttaaataaggtaaattatgggagttaagtttttgttggttaggtttaggaaagatagttgaaaataaagtagtaatgtagagatgagaagtttagtttagtttttgttttagttttgtttaaatttagttttttttgagtttggtttaggtttgtttttattttggagtttttttttatagaattgattagaggagattagatttttgggtggtcgttgttgttatttttttagaggtggtgtttataatttttttaaatttaaaagtaggtaaatgggagtataggatttatttttttaaaattatttgaaaattaaattttttttttattgaaattagtatttttagaaatattttatttggtaatattttttttatttttgtagatttagtagttgttttataagttgttataaagttagtataaagatataaagagaataatgagaaatttttttttttttttttttttttttttttttttttgagatcgaattttattttgttgtttaggttggaatagtgttatttcggtttatataatttttgttttttcggtttagatgatttttttgttttagtttttcgagtagttgggattataggtgtgttattatgtatagttgatttttgtatttttagtagagatagggttttataatgttgattaggttgattttgaatttttgattttaagtgataatatttattttggttttttaaagtgttgggattataggcgtgagttatcgtgtttagtggagaaatttttgtgaattaaatttgatttttttttttttgtattttttttatttgtttatagttagtttttatagtgatagggaaataagaagaaatagaaaggttgagttattatttaaattttgttgggaattatgggatatttaggatttatattttaggggtttatatggtttaatttatattatgtgatgtttttagtatagtatatattgtgagtatatagtataagtttaataaatattgttttaatgtatgtattcgtgttgttttttaaatgttgatttagatataattgttttttttagtttttgtatttgtagattttaaatggttggtaaagggtgtgattttttaggatagtggttggtggtttttattgtgaacgaaaagtatttttgttgtgattagagtattgggcgtaagggattttgtgttgtgtttgttttttttagttgagtgttattgataatgggtttaggaggagtaatattagtattgataggggatttgttaaagaagttagtttatggaaattttttaaatttgtagaattatattatttagagggggtttagaatattaaatgatatgtatgcgtattgaattttgagaggtaatgtttagttaagtgatttttagtttaggtttttaagtagggttatataattagtttgaagatttatggttatttgtatttttttttatagattgtttttttatgattatattaagattatgatttattgttttttttcgtttatattatagtaatgattatgggtttatttgtgtattagtattggtattaatttgttttattatagacgatgttaattttatttatttggtgtaggtgttttttgttagattttttcgttataaagttaattatttttttttttgtaatgagtatttaggagggaggatttattgagtgatgtttataaattattatatttaatttagagatttttatttttttttggtttttttttgtttgtagttttttttgtagagtaaaggtttttatatttgttgataggagataatagtttttaagattggaagttttgaagtaggttttagttttgtaggtttttattttattttattttatgttataagtatatgtttatttattttttatatttttagagaaagaataagaattaatatataataaatatgtttattgttttaaaattttaaaatatataatagtatatagaataaatataataaaaatttgaaaaaaaatattagatttagaaataagagtttttattttattttattgtatgtattggtttttataaaggtattataaaaaaggtattatttataaagagttttatagtttttatataatttaaaatatttttaaattttatttatatagaaatattattttatttttagtgtgtatatagttattattatgtgtatatatgtatataaaatgaaagtattattcgattattattgtgtggttgtttttttgttttcgttatttagttacgaaattttttttgaatattttgttaaggttgtttttgtatattggtcggtatgtttttttgagataaattttaaattagataaattgaggtaaaatataaattattatgtagtaaatatttggaaaataatttttatataagaggaagaatataattttttttagattatttattgggttttatatatgtaaataatttttaggatgatatttgatatattgtgtatgtttaaaaaggattattattattttagttgttataatttgtaaattttataaaatttttagttttatattatgtttgaattttttttttagtgttcgatttttttgttatttaaaagtggttttggggtttgaagtattaatattattggtgaatttgttagatatgtagatatttagttagttatggtggtttatgtttgtagttttagttatttaggaggttgaaataggaggatcgtttgagtttaggaggttgaggttgtagtgagttaagatttaattattgtattttagtttgggtggtagagcgagattttgtgttaaaattaaaaattaaaaaatatggaaatgtagaaatttaaaatttagattttttgaattagattttgtttttgaagaagatttttagtttattgttgtatattatataatttgagaagtatgtttttaagttattatgatttttgtatttgagaattatatatagttgattttggatgatgtaaatatagtatttaaaaatgtatatttttgtgttgatgttttagttttatattttatatttgatataaatatttatattagttttgtggattttatgttattttttttttatagagtttgagattatattagaaaatattattgtgttaaaaatgattttattgaataatttaggttatttatatatgttagaattaataattgttattttattttgggataaatgaagaattttgttatggttatatggttagtgtattttttatttttattttagggattgttgatatttagggatgtggtcgtagaattttttttggaggagtgggaatatttggaattagtttagaagaatttgtattaggatgtgatgttagaaaattatagaaatttggtttttttgggtgaggataatttgttttcggaatatttaataattaagagttttattttttttttagaatgttttttgggattttgtgttttgtatgagttagttttagatttttgtttttaggaaaaaaataggggttttgttgaagtagaaaaaattttataatgtttgattttgatattcgtttttttatttgaggtgatgtataagttttattttagtcgtgattttagaaattggttgatataaattattgttgtttatattttaaaatttaattttttttgtttgtttttgatttagttagatttgtagaagtttaggatttttagatttaaaatgttttttaaatattttaaagaagttggtaggaaataatattttgagaaatattttttaagaattttttataatgttttattttttttattgagtatagtattaagttagaaattaattttgttttgtggggttaaaaaaaagtataaaaataaaaaataaaaagaatttttattaagagttatgtgaatttttttaataaaatagg

SEQ ID NO: 76 - DNA, 5666 bp, Artificial Sequence
  chemically treated genomic DNA (Homo sapiens)
tttgttttattggaaaaatttatatgatttttaatgagggttttttttattttttatttttatatttttttttggttttataggataggattaatttttaatttagtattgtgtttagtagaaaaaataagatattatagaagatttttgaaaagtattttttaaaatattgttttttattagtttttttagaatatttaggaagtattttaaatttggggattttgagtttttgtaaatttgattgaattaaaaataaataaaaaaaattggattttaaagtgtaagtaataatagtttatgttaattaatttttagaattacgattagagtgaaatttgtatattattttaaataaaaaggcgaatgttaaaattaaatattatgaaattttttttattttaataaaatttttattttttttttgaaaataagaatttaaaattaatttatataaagtataagattttaagggatattttgaaaagaaaataaaatttttagttattagatatttcgaaggtaagttatttttatttagagagattaggtttttgtagttttttaatattatattttgatataaatttttttgagttggttttaggtgtttttatttttttaaagagaattttacggttatatttttgaatgttaatagtttttgaaataaaaataaagaatatattgattatgtggttatggtagagttttttatttgttttaagatgaaatgatagttattggttttgatatatatgagtgatttgaattatttagtaagattatttttaatatagtaatattttttaatgtagttttaaattttgtggaaagaaaataatataaaatttataaaattagtgtagatatttatattaaatgtaaaatataaaattaaggtattaatataggaatatatatttttgggtgttatatttatattatttagaattagttgtgtataatttttaggtgtaaaagttatggtgatttagaggtatattttttaaattgtatagtatataataataaattggagattttttttaaaggtagagtttgatttaggagatttagattttgagtttttgtatttttatattttttaatttttaattttgatatagggtttcgttttgttatttaggttggagtgtagtggttgaattttggtttattgtagttttaattttttgggtttaggcgatttttttgttttagttttttgagtagttaaggttataggtatgagttattatggttggttgagtatttgtatgtttaataagtttattagtagtgttaatgttttaggttttaaagttatttttgaatagtagagaggtcgaatattgaggaaagaatttaggtatgatgtgaaattgagagttttatgaaatttataagttataatagttagaatggtagtaattttttttgaatatgtataatatattagatattattttaaaagttgtttatatatataaaatttaataaataatttgagaaaaattatatttttttttttatataaaaattattttttaaatatttgttatatagtagtttgtattttgttttagtttatttgatttagaatttattttaaagggatatatcggttaatatatagagataattttaatagaatgtttagagaagatttcgtaattgagtaacgaaaataagaaagtagttatataatagtgatcgaataatgtttttattttatgtgtatatgtgtatataatggtaattatatatatattaaaagtaagataatatttttgtgtaaataaaatttaaaaatattttaaattgtataaaaattataaaattttttgtgggtgatgttttttttgtgatgtttttataaagattaatatatataatgaaataaagtaaaggtttttgtttttgagtttggtatttttttttaagtttttgttatgtttattttatgtgttattatatattttagaattttaagataatagatatatttgttatatgttaatttttgttttttttttgaaaatatagagaataaataagtatatgtttgtgatatgagatgaaataaaatggaaatttatagaattgagatttgttttagaatttttagttttaaaagttgttattttttgttaataaatgtgagagtttttattttgtaaagaaagttataagtaaagggaaattaaaaagaaatgggagtttttggattaaatgtgatggtttatagatattatttagtaaatttttttttttagatatttattataaagagaaaaatgattaattttatagcgaaggaatttgatagagagtatttgtattaagtgaatgaagttagtatcgtttgtaataagataaattggtattagtgttaatgtatagatgggtttataattattgttgtgatatgggcggaggggaatagtaaattataattttaatataattataaaaaaataatttgtgggggaagatataggtgattatagatttttaaattggttatgtgattttatttagaagtttgggttgagaattatttagttaagtattgttttttaaggtttaatacgtatatatattatttggtattttgggttttttttaagtaatgtgattttgtaggtttggaaagtttttatgaattggtttttttaataagttttttgttaatgttgatgttgttttttttagatttattattaatagtatttagttagaggaagtagatatagtatagagttttttacgtttaatattttaattataataaaaatatttttcgtttatagtgaggattattaattattgttttgaaagattatattttttgttagttatttaaagtttatagatatagagattggagaagatagttatgtttaagttagtatttggaaaatagtacggatatatgtattaaagtagtgtttattgagtttgtattatgtgtttatagtatgtattgtgttgggaatattatatggtgtgagttaagttatataaatttttgggatatgggttttaagtattttataatttttagtaggatttagataatggtttagtttttttatttttttttgtttttttattattataaaagttaattatagatagatgggagggatatagaaaggaaggagttaagtttagtttataagaatttttttattgggtacggtggtttacgtttgtaattttagtattttgggaagttaagatgggtgttattatttgaggttaggagtttaagattagtttggttaatattgtgaaattttgtttttattaaaaatataaaaattagttgtgtatggtggtatatttataattttagttattcgggaggttgaggtaggagaattatttgaatcgggaaggtagaagttgtgtgagtcgagatgatattattttagtttaggtaatagagtgagattcggttttaaaaaaaaaaaaaaaaaaaagaagaagaaaaagaattttttattattttttttatatttttatattgattttgtgataatttgtgaagtaattattggatttgtagaaatgaaaaagatgttgttaggtggaatgtttttaaaggtattggttttaataagaaaaaaatttaatttttaaataattttgaaaaagtgagttttgtgtttttatttatttgtttttgggtttggggaaattgtgagtattatttttgaagagatggtagtagcggttatttagaaatttgattttttttagttagttttgtgaggggaggttttagggtagggatagatttggattaggtttagaagaggttggatttgggtagagttggggtaggggttgggttaggttttttatttttatattgttgttttatttttagttgttttttttaagtttgattaataagaatttgatttttatggtttgttttgtttaaatagtttaagttttattttattttgtaatatgtaataagtaatttaattaaaatatgtagggttttttacgaaaattatattagtagttatataattatttttaataagaaaaaattaatataaataataattataataataatttttttgtttacgggtggtttttcgggtggtgatattagaatttataacgttaatataagggtagtgttttaaattaagtttaagttttttgtatatttttatttttgtttttgattatatgatgttgaatttaattattattcgtttgttttagattgaaagtttttggatggtagggattatggttgttgtatttgtttttttagtggttatatgaaatggaagtaattggtttatttattagtatgagtttttagaatttttttttgtattttatttatatattagaaaattggagtaatttttatttggatattaaataaggagattttttttgttaaaaaagaaataaattttgatgatttatttttttttttttgagacggaagtaagattagttcgttgttagtttgttttttgtttgtataggatatataattaagtgttttttaggtgttggtaagagagtttttggtaattgtgtgatgaaaatttaatagtgatttaggtaggaaagatttaagttgtttttgtggaattagaatagaaaattgagttgttatagtagggttatagatttaggatttagatatgttattatttatatttgattagttgatttttgggtataagaaaggataagattattttattttagtaatatagtttataggtaggtatagttttatttatggttttggatagtggtggttttattttttttttgttaaggtgttgttttatatttatagattttgttacgagattttgtttataaaaaggaattatttatagaattgttgtagtttattggataaggttttgaaaattttgagggttttattttaaaagtagggttttataaagtttatgttgattttttataatgtagaaaatgttttttggattttttatatattttgagtttaaagtttggttttgttttgtggattttaggtggagattagtttttatgtgtagattttaggtggaattaatttggttttgtaatttttgtgtattgttgtgaagaaaattagaggagatagttttttaggaaggttgtttttatatattttggagaattttaggatttgggtttagaatttatagttgtagatttaggtgttggtggcgtagggaagtggtatgtattttttgtatatttatgggtatttgggtaagaggatgaagggaatgttgagatttttcggtttgtttaatgtatgtgtgtgtttggttggtttttagtttttatggtttttgaattagttttaggtttgaagatgttaggggtatggaaagatagagttggaatggttaattgatgttttgtaaatttatttttatagaaatttagttaaattattttagaagcgattgaagattttaagtaagtagaaagattattttgtttgtagattttcggggtaatgggtattttgttgtataaatgtgggttgtgaatagaaattaaagagggaaaggatttattggagtgaagttttataggtatcgtataggtttatattttgtgtagtaattttgggtaatgtttgaaaa

SEQ ID NO: 77 - DNA, 8842 bp, Artificial Sequence
  chemically treated genomic DNA (Homo sapiens)
tttttattgggagttttttttttgatttaattttaatagaggtatttttttttaagtgttgtttgtaatttagtttttaatgtttgaagatatatttttagttttttttttgacgtttttttgtttttttaggaggtttttggagggaaggattttatattggttttttgttgagtggtttagttttggtttatgggatacgtgtgcgtttgttttgtttagtatacgttggggttgttattatttttagagtagtgtaggtttttggcgttattatttaagtgttttgttaatttttagggtaggagttagagttttatttgtaggtgattttggtttttttaagattgagttgatatttgtgtttttagtaaatatgtttttgagtatttttgaatttatttgttaagtttggtttggaaagtgtgaagggagagttggggttcgtagttggaaagatttttattttttgttttttttttgaatttatttgatgttttttttttggttaaggggtaaatttgtatatgtaagttttatatattttggttttttatggaattggtttttgtagaagtcgggttagaaagaatttagtatttttttgtattataatttattgagtttttattttgtgttaggtatcgttttaagtagtttatatttaagattggatggatttttattatttttatttttatttcgagaaagagtatttttttttaagataggaaaaatagttagggttataaaggagggttttttgtgatattattagaagtggagaagaggtatttagattttattagtaaagtgtagtcgaagagttatgttaagtttattgtgttcgttgcggtattgttttttttagtgttggttgttattatataattttatagtttgtgtggtttaaatagtagatatttatttttttagtgttttggaggttggaagtttgagattaggatgttaatatggttaggtttagggagggttttttttttggtttgtagatagttgtttttttattgtgtttttatatgggtagagagtgagtgagagtaagttttttggtgtttttagttttttatcgaaattttattattttacgaaggttttatttttaaatattattacgttgggggttagggtttaatatatgtatttggggggatattatttggtttatagtaggtattgttcgggttagaaggttttttagggatttagttttgaggttggttgtggaaggtgtttttgttttattatttttgtatttgttttattgtaagaattgggtagatagattggtagtttaggttaagtaagatagatggtacggaggttcgataggaaggtttttggagattaggaagataggaattaaggaaggtgaagaggaagaaaaaaggattttatgaagaggagagggtttttaaaagttggaaatataagtgaggaggtgagaattagtttgaagtatttatttgtgatttggtgggggtaggaaggtgttagaggagttagggagttgattagacgggaggaattttttttattttttatggaggtagattatcgttggtttgtaattggtatttttagagttaggaattattgtgtttatttttttagattttttttattggtgatgatttgattttttttttttgtattaatgagtaaggtggaggaaagagattttttttttttatatatatattattttatttaatgtttattaattttaagaggtaggaataattgggttacgttatagtgaattgtttttttgtaggttaaaatttaaatgtaggtgatgttatagagtttaatttagtattattattaatgttattatatagattaggagattgaggtttcggaaggttaagttatttgtttaagtttatatatttggtgagttagggagtttggatgtgaattggggtttaatttttaaatttgttgtggtaggttgttatttatggaaataggggtttttgcgggaatgtgtaagagatgaggttggtaagtatgatttttagatgttaggagttgatttgtgtggttattaatgggaagtttttgaagatagaaaggtagagtagtaaagtagaattaatagggaagggatgaggaggtcggagggtaagtaggttattgcgagattaggacgaaatttattgggatcgtgagatgttggaaggaaggattagagaatttgggattatgttttgtatttttttgttgtaataaatggtattgtatgagatattatttattgttatgtgtttttattgtagttatttttgtaatttatatgataagaaaaaatgatagggtgatttttatatatgtgtatatttatttatatattttttagattaggagcggtgatttgagtttattagatatgtttaattaggtaataattaatttaggttattaaattgattatttaaattaatttaggaaattgatgattttaattaaggtaaatatatataatgaaatatatgtagttgttagaaagggttagattttatatattaaaatggaaagaaagttttttgaaatttaagaaaattgtgtttttattatgtgagtagaaattttgtgtatatagaaaaatggttttttttttttttttttttttttttttcgttttttgagacggagttttgttttgttgtttaggttggagtgcggtggcgtgatttcggtttattgtaattttcgttttttgggtttaaattatttttttgttttttgagtagttgggattataggcgtgcgttattatgtttagttaagttttttgtatttttagtagagataggggttttattatgttggttaggttggttttggatttttgattttaggtgatttgtttatttcggttttttaaaatgttgggattataggtatgagttatcgtgtttagttagaaaaatggttttttaattggaaatgtaattttagagaataaagaatagaattatattgtaatatgataagtaataatatatataagcgttaaaggattttttttttttttttttttttgtttttcgatatttgaggggtaggtttcgtggagtttttaggttgagaggttgagattggtagagtaggttgggttttggattttgatatttttgggtaggagtgttttaaagattgagatattatgtttattttttggggtttttgtttttggtattatatttagtatatagtagttgttttataaatatttattaaataagagtagaattaaatatatttggttagaaattgtttttaggtagtaaggaattaatacgtggaaaatatggggtttttggagtagtgttaatgtaagttagtttttgtaatgtatatagtgatatttattgttaatgatacgtgttggagtttttttattgttgattttttatatttatttatttttgtttttaagtggatgttggtggaaatttgaggatatatttttgtgtagtagatagtatttgtaagtaaatttgtgtaggtttagggttatattgataaaaatatatgagagtaaatatatatagaagttgttttaagaatttttgatgttttagatgttttgatttttggaagttttattttatatcgtagtaaatatattaaaatatttttatattttttaaatatttttaaataatgtgagtgttaaaataatagttttatttgaaattatttgatgttgcggaatttattttttaatgattatgatttttcggtaattacggtattagggaatttatattaagtgatgtttaagttatagttttaaaatataatgaaatatttatttattaatatattataattatgaaattaatatgttttggggatttttatttaaatatttattaattttagatttgtagtatattttttgtattgtgtagttaataaaatttttagttttaaatatttttataggtttttgaaaagtttaacgtaaaaaatagtttttatgtgtgattttttattgggtaataaaagttaatcgcgatttttattttttttttattttagggtttttttaggatagaacgcggaaacgttttttttttcgtttttagggatttttttttttttttagtgtcgtttttttttttttttattttatttttataataaatgttagtgtatatttaggagcgggtggttttataggggatattttaacgtttatttaggagcggttggttttatagaggattttttaacgttgacgttttttggagaaaaggatttgtgatgaaaatttttttaaggggattttttagcgtttagtacgttcgatgtttttgttttagtcgcggttttagcgggtagtggttttttttgaagttgggatttttttgtttttttcgggtagcgtaggttatcggtgattcgggacggtttgtaaacgattttcgcgttttcgttttcgtggaataacgcgcggcgggtattattgtttaatatttagcgttcgtgaaggcggagatcggcggggtagttagtttttggttgtggattttgattaatgggtcgtaggcgtacggtttgtatcgttcggttcgttgttagtggttcgttcgggagtcgtcgtattttcggggttgttcgttcgagtcggtttggaaggtagaggacgtttttaggtcgtttcgcggggttttcggaatttttgggaaagtttttttgtagcgtcgtttttggattttaggtgtgaggagcggggttcggttagcggttttagaagaggttcggattttattgtcgtggttgtcgggggcgggaaagtgatttttcggaaagtagagtatttcgaagaaggcgggtcgcgcgagttaagttgacgttattggtcggtgtggtcgtcgttttgcgtatcgttcgttttttttacgattttttttaaggtcgcgcgatcgttggcgtatcgtttggagcgcggtagtaagcgtgggaacgcgggcggcgagacggcggtaggacggcggtaggtaggtatagtgggcgggtagggcgttcgtgtttcgcgcggttcggtttcgcggggttttcgacgttaggcggggcgtgggggtggaattatttatcgtaatgttttcgggcgtagtttagtggttattcgtgtttttttttgttttttgtttattttttagttatttaagtttaatttgaatgtttaagtcgttgattgtcgtttgtttgtttttaaagattggtagatagatgtttttttaaaaattttatttttttttaaatttggtttatatggaaaacgttaggagagtttatataatgaacggtaatagtaattttttattttgaaacgcgttttattattttattgaaattttattacgtggaataatgtttggagggttagagttgtggaattgtttaataattaatcgttattgagggttagtttgtgaaggaggggatagattgtttttaaaattttgtttaatgatagttaattaagatttttgagtttggtttgagggtttttgtttttattatagtttagtcgtttttggtaagagagtttgtatatgggttatagtttataaaagtattgtttgaaaaaatttattgaaagaatattgtttgtaaaatgagttttaatatataggatagatttttttaaggtgagatgtgttatttatttagagttgtgaaaggttttacggatggaaattagagattgaattttttagaattttaagaagtttttttaattaatggttttttattttttttttttaaattaaaggtaagaattggtagttaaaatgatagtttaaagtttgtttttttgggttacggtagttttttttatgaaaagatttgggagtgatttagttatttgaggaaggttggtgttagagagagaaatggttttggtgttttttggtttagtgatgcgggtatgttaggttagagcgagtgttttgggtttttcgaggcgggggagagggtggggtttgttgttgttagtttaggtgtgatttgtaatttggattaggtgggtttagggtaattttttattacgttttttttggaaagtttgattgttgtatatatttttagggttgtagatagggtttggttaatagattattttaaaattaagaagaggaagttataaatatgtgattagatttattaattttttttggttgggtatttggtggaattcgtttgttaatgtttaataaattattatggattataattgtagtagaattttaggtttttgatgttatttagaattttggaggagattacgaaggatatatagacgtggttgtatatgtgtagagattttgtaatgtaattatggtttttttttgtattatgtgtgaaataagttgtcgttggcgttggggcgtcggtttgggttttaatatagttcgttggttgtttcggtatttgtcgtgtttttttgggttttagtttttttttttttaaataaagaggggattggattagatgatttttaaagtattttttagtttttagatgttatgatttatttttttttttttttttttaaaattttttttttttgtaaattattaagatagttgttttgaatagtttagatgttatgaatttattaggaattttgataagaaagtgttgattttttttttagaaaaatgcgtgtattaataaaatttttgtttttggttgtaggaggtttaggaattgtggattttagtttaagaaatttgtagtaaggaaattaggggagttgaaagttttagaagttaatttttatgttgtgttttggttatttttgtgtagtttattttttaatttaggagaaatttttttattttgttttaggaaagagttgttaatttgttttcggggagtgtgggggggtttttggtattggtgttttatttttttttttaggtatttttttttaagtttgttttttttttatgataaatatagtggtttgttttagaattttgggttttttgagatatagttttttaatttataggtgaggaagttttagggagaggtttaagtgacgttataaggtttggttagagaaaagtttttgttagagtttagagtttttaaattaaggtttaatttgggtgggcgtagtggtttatatttgtaattatagtattttaggaggttgatgtgggaggattatttgaggtcgagagtttaagattagattgggtaatatagcgagattttgtttttaaaatgtatatttgggtgtggtggtatatgtttgtagttttaggtatttaaggggttgaggtaggaagatcgtttaagtttaggagttttaggttgtcgcgagttatgatggtattattgtatttttgtttgggtgatagagtaagattttgtttttaaagaaaaaaaaattgaatttatttttttttaaatttataaacgtataattgaggttgttggatggggaatttaagaaattttatttttttttttttgggatttggttttgtttttcgttttatggttatttgtagggtggttgaagtttttagaatgcgtattttttgtgaaggttttgattgatattttgttttttggattagtgtggttttattatattttgggatgttatgttttgttattgttgattgttttaaattcgtttgtttaaagaggttatattttaattagaagaataaaaatgttatttttttttttttttgggtgggcgtttatttagttgttttggggatttttagtattgtttttggaaatgttggttttaagtcgataggttatgttagttttttttttttttttttgtgttgttggggaagttgtttgtttgggtgagagtgtttttttaaaggatgtttttgggtgttttgggatggttaggtttttagagtgggatatgttttggaagaggagtttagtgaattttgttttgttcggtagttgtagtttatttttttatttttgtttttattttttagttggtcgtaggagttgtttaggaaggaagtttggataataataatgatatttggcgtgtaaggtttaggttttgttttagttgtttttcgtgtagtatttgaatttttttataattagtataggtagtgttttgttagttgtatttgggattgggtagttgatgttttgagtttaaatgttgatttagcgttttttagttgagcggtggcgggatttgaatgagatcgcggttttgttttatttttaaattgttgtttttattattgtgaaggaatagttatttagatgggttggtttgagggtttttttttttttagacggtacggacgtagtattttattagggaatgtggggttagttgggtatttggtagtttagttggtttttcggataatgggttgtttagtgaaggaatttggtgttgtaaaagtgattttttttttttttttagttttgggttaaaattggagttgtttattgtggttgtatttgtttgaaaggaaagggtagatgaaagttggaaggagtatagttagtatagtgggaggggtttgtagggggttgttggtggttgtaggtggttgtaggttttttacggagtttttagtttgtatttagggttgtgaggttatggaggttagtattgtttttttatggtaggtgtttcggagtttttgaatttgtgggttttttttaagttagtatttttgttgtaaatttttgagttttttgttagtagtttttgggttgttgtgatgaatgagataatattcgtaatattatagcgtgtatttttgtttttttaagg

SEQ ID NO: 78 - DNA, 8842 bp, Artificial Sequence
  chemically treated genomic DNA (Homo sapiens)
ttttggaaagatagaaatatacgttgtgatattacggatattgttttatttattatagtaatttaaaaattgttaataggaaatttagaggtttgtagtaaaggtgttggtttgggggaaatttatagatttagggatttcgggatatttgttatgagaaggtaatgttggtttttatgattttatagttttgagtgtaaattgaaagtttcgtgggaaatttgtagttatttgtagttattagtagttttttgtaggttttttttattgtgttggttgtgttttttttagtttttatttgttttttttttttaggtagatataattatagtgaatagttttagttttagtttaagattggaaggagagggggaattatttttatagtattaggtttttttattgagtagtttattattcgaagaattaattgggttattagatgtttagttggttttatattttttgatagaatattgcgttcgtgtcgtttgggaaagaggaggtttttaggttagtttatttaaatagttgtttttttatagtgataagagtagtagtttgagaatgagatagaatcgcgattttatttaagtttcgttatcgtttagttgggagacgttggattagtatttaaatttagggtattagttatttagttttagatgtagttaataaaatattatttgtattggttgtaagagaatttagatgttatacggaaagtaattgagatagggtttggattttatacgttagatgttattattattatttaaattttttttttgggtaatttttacgattaattgaaagatagggataagagtgaggaaataaattgtagttatcgaatagggtaaagtttattgggttttttttttagaatatgttttattttagggatttaattattttagggtatttaaagatattttttggaagaatatttttatttaagtagatagtttttttaatagtatagagaaagagagagagaattagtatgatttatcgatttagagttaatatttttaagaatagtgttggaaatttttaagatagttggatagacgtttatttaaaaaaaaaaaaaaatagtatttttgtttttttgattaaaatgtgatttttttgggtaaacgagtttgaaataattagtagtaataagatataatattttaaaatatggtagagttatattggtttagaaagtaaaatattaattagaatttttataagaagtacgtattttggaaattttagttattttgtaggtggttatgagacgggaaatagggttaggttttagggaggaggaggtgggattttttaaattttttatttaataattttagttgtgcgtttatggatttaaaaggggatgagtttaatttttttttttttagagatagggttttgttttgttatttaggtaggagtgtagtggtgttattatagttcgcggtagtttggaatttttgggtttaagcgatttttttgttttagttttttgagtatttggaattatagatatatgttattatatttagatatatattttagagataggatttcgttatgttgtttagtttggttttgaattttcggttttaagtgatttttttatattagttttttaaagtgttgtgattataggtgtgagttattgcgtttatttaaattagattttggtttgaaaattttgaattttggtaaaggtttttttttaattagattttgtgacgttatttgaatttttttttgaggtttttttatttgtaagttgagaggttgtattttaagagatttagaattttaaagtaggttattgtgtttattataaagaagggatagatttgggagagggtatttgagaagagaaatggaatattaatattaaagatttttttatatttttcgaaaataagttagtagtttttttttggggtaaggtagaaaaattttttttagattgaggaatgagttgtatagaggtggttagaatataatataggggttggtttttgagatttttaatttttttgatttttttgttataagttttttaaattagaatttatagtttttgagttttttgtaattaaaagtaaaaattttgttagtatacgtatttttttagaaagagggttaatatttttttattaggatttttaatggatttataatatttaaattgtttaggataattattttggtgatttataggaaaaagaaattttaaaaggaaaaagagaagagtaagttatagtatttgaaagttggaaaatattttagaaattatttaatttagttttttttttatttaagagaggaaaaattgaggtttagagaggtacggtaaatatcgaggtagttagcggattgtgttggaatttaggtcggcgttttaacgttagcggtagtttattttatatatggtgtagagaaaagttatagttatattataagatttttgtatatgtgtagttacgtttgtgtgtttttcgtggttttttttaagattttaagtaatattaaaagtttgagattttattatagttatgatttataatgatttattaaatattaataaacgaattttattaaatgtttagttaggaaaaattaataagtttaattatatgtttataattttttttttttgattttgaggtaatttattggttaagttttatttgtagttttagaaatgtatatagtagttaggttttttaggagggacgtgataagaggttgttttgggtttatttaatttagattataggttatatttgagttggtagtagtagattttattttttttttcgtttcggagggtttagggtattcgttttggtttagtatattcgtattattagattagaaagtattaaagttatttttttttttggtattaattttttttaagtgattgaattatttttaaatttttttatagaggaagttgtcgtaatttaaaaggataagttttgaattgttattttaattattagtttttatttttggtttaaaaaaagaaagtggggggttattggttggggagattttttaaaattttggaaaatttagtttttagtttttattcgtaaagttttttatagttttgggtaagtaatatattttattttaggaaagtttgttttatgtattgggatttattttataaataatgtttttttaataaatttttttaaataatgtttttgtgagttgtggtttatatatagatttttttgttaaggacgattgggttgtgatggaagtaaaggtttttaagttagatttagaaattttaattgattgttattaaatagaattttagaagtagtttgtttttttttttataaattaatttttagtaacgattggttattgggtagttttataattttgattttttaagtattattttacgtggtagaattttagtgggatgatagagcgcgttttaagatagggggttgttattgtcgtttattatatgagtttttttaacgttttttatgtaaattagatttaaagaaaaatgagatttttaaaaaggtatttatttattaatttttggaaataggtaaacgataattaacgatttgggtatttagattggatttaggtggttggaaaataggtaaaaagtagagagggatacgggtggttattgagttgcgttcggggatattacggtaggtagttttatttttacgtttcgtttggcgtcggggatttcgcgggatcggatcgcgcgggatacgggcgttttattcgtttattgtgtttatttgtcgtcgttttgtcgtcgtttcgtcgttcgcgtttttacgtttgttgtcgcgttttaggcgatgcgttagcggtcgcgcggttttaaaaagggtcgtgggggggacgggcggtgcgtagagcgacggttatatcgattaatagcgttagtttggttcgcgcggttcgtttttttcgaagtgttttgtttttcgagaaattattttttcgttttcggtagttacggtagtggggttcgggttttttttggagtcgttggtcgagtttcgttttttatatttggggtttaggggcggcgttgtaggggggtttttttaggaatttcggaggtttcgcggagcgatttggaggcgttttttgttttttaggtcggttcgggcggatagtttcgggagtgcggcggttttcgagcgagttattagtaacgagtcggacggtgtagatcgtgcgtttgcggtttattaattagaatttataattagaaattagttgtttcgtcggttttcgtttttacgagcgttggatattgggtagtgatgttcgtcgcgcgttattttacggggacggggacgcgaaggtcgtttatagatcgtttcgggttatcggtggtttgcgttgttcgggaggggtaggagaattttagttttaaaggaggttattgttcgttgagatcgcgattgaaataggagtatcgaacgtgttaggcgttagaaggtttttttggggaaatttttattataaatttttttttttagaaagcgttagcgttaagaggttttttgtgggattagtcgtttttgggtgggcgttaagatgttttttgtgggattattcgtttttgggtgtgtattgatatttattgtaaaaatgaagtgggggagagggagaacgatattggaaaaagaaagaaatttttggaaacggaaaaagaagcgttttcgcgttttattttggggaagttttggaatggggggaaaatgagggtcgcgattggtttttattgtttagtagagaattatatatgggggttgttttttgcgttgagttttttagggatttatgaaaatgtttgagattgaaaattttattgattgtataatataaaaagtatattgtaaatttgagattaataaatgtttaaatgaaggtttttaaaatatgttaattttataattgtaatgtattgatggataaatgttttattatattttgaaattataatttagatattatttggtatgaattttttaatgtcgtgattgtcgggaagttatagttattagaaagtgagtttcgtaatattaaataattttaaatgaaattattgttttaatatttatattatttaagagtatttagagaatatgagagtgttttaatatatttgttacgatgtgggatggagtttttagaaattagagtatttaggatattagaagtttttaaaatagtttttgtatatgtttatttttatatatttttattaatgtggttttaagtttatatagatttatttataaatgttgtttgttgtataaagatgtatttttaagtttttattaatatttatttaaagataagggtaagtgaatataggaaattaatagtggaagggttttagtacgtgttattggtagtaggtgttattatgtatattataggaattggtttgtattaatattgttttagaaattttatattttttacgtgttggttttttgttgtttaggaataatttttaattagatgtgtttagttttgtttttatttaatgggtatttatgaggtaattattatgtgttagatatagtgttaagaataggagttttaaagaatgaatataatgttttaatttttgagatatttttgtttaggagtattagaatttagaatttagtttgttttgttagttttagttttttagtttggaggttttacggagtttgttttttagatatcgggaggtaaaaaaaaaaaaaaaaaaaaaattttttagcgtttgtgtgtgttattatttgttatattatagtgtggttttattttttattttttggaattatatttttaattgaaagattatttttttggttgggtacggtggtttatgtttgtaattttagtattttgggaggtcgaggtgggtagattatttgaggttaggagtttaagattagtttggttaatatggtgaaatttttgtttttattaaaaatataaagaatttagttgggtatggtggcgtacgtttgtagttttagttatttaggaggtaggaaaatagtttgaatttaggaggcggaagttgtagtgagtcgagattacgttatcgtattttagtttgggtaatagagtaagatttcgttttagaggacgggaggggaggggaggggaagaagaaagattatttttttgtgtatataagatttttgtttatataatggaaatatagtttttttaggttttaaagggttttttttttattttagtatatgggatttagttttttttaatagttgtatatattttattgtatatatttgttttaattgaggttattaattttttaaattgatttgggtgattaatttgatgatttgaattgattattatttaattgagtatatttagtgagtttagattatcgtttttgatttggaaggtgtgtaaataggtatgtatatatgtaaaaattattttgttatttttttttgttatataaattataaaaatgattataatgaggatatatggtaataaatggtattttatgtaatattatttattgtagtaaaaagatgtagagtatggttttagattttttgatttttttttttagtattttacgattttagtaaatttcgttttgatttcgtagtggtttatttatttttcggtttttttattttttttttgttgattttattttgttattttgtttttttgtttttaggggttttttattggtagttatataggttaatttttggtatttaaaagttatatttattaattttattttttatatattttcgtaggaatttttgtttttatggatggtagtttattatagtaggtttgggagttaggttttagtttatatttaagttttttgatttattaaatgtgtgagtttgagtaaatgatttaatttttcgaagttttagttttttaatttgtataatggtattgatggtaatattaggttaaattttgtgatattatttatatttaaattttgatttatagaagggtagtttattatggcgtaatttaattgtttttgttttttaggattggtgggtattgagtgagatagtatatgtgtgagagagagagattttttttttttattttgtttattagtgtaagaggaaaaggttaaattattattaatgagagaagtttagaaaaatggatatagtgatttttaattttaagaatgttagttgtagattagcgataatttgtttttatgaagaatgggaagggtttttttcgtttggttagttttttagtttttttaatatttttttgtttttattaggttataggtgggtgttttagattggtttttatttttttatttatgtttttagtttttagagatttttttttttttatggagtttttttttttttttttttattttttttaatttttatttttttgatttttagaaatttttttgtcgagttttcgtattatttattttgtttggtttaagttgttaatttgtttgtttagtttttatagtggagtaggtgtagaggtgatgaagtaagggtattttttatagttagttttaggattaaatttttgggaggttttttgattcggatagtgtttgttatggattagatgatgtttttttaaatatatatgttgagttttaatttttaacgtgatggtatttggagatgggattttcgtggggtaatgaagtttcgatgagggattagggatattagagagtttgtttttatttattttttgtttatgtgaggatatagtgagaaagtagttgtttgtaagttaggaagggagttttttttaaatttgattatgttggtattttgattttagatttttagtttttagaatattgagaaaataaatgtttgttgtttaagttatataagttatggggttgtatgatggtagttagtattgaggaaggtaatgtcgtaacggatatagtgaatttagtatgatttttcggttgtattttgttaatgggatttgggtattttttttttatttttgatgatgttataaaaggtttttttttatggttttggttgttttttttgttttgggaaagggtattttttttcgaaatgggaataggagtggtggaaatttatttaattttagatataaattgtttagaacggtgtttgatataaagtaaaggtttaataaattgtagtgtaagagggtgttagattttttttggttcggtttttatagggattaattttatgaagagttaaagtgtatgagatttatatgtgtagatttattttttggttagaggagagatattaaatgggtttaggagagaggtaggaggtgagagtttttttagttgcggattttagttttttttttatattttttaagttaagtttagtaagtgagtttaagagtgtttagaaatatgtttgttgagagtataggtgttaatttagttttgagaaagttagagttatttgtagatggggttttgatttttgttttggaaattgatagggtatttgggtggtggcgttaagagtttgtattgttttgggaatggtggtagttttagcgtgtgttgggtaaggtaaacgtatacgtgttttataggttagagttgggttatttagtagagagttagtgtggggtttttttttttaggggttttttggaaaggtaggggaacgttaggagagaggttgaaggtgtgtttttaggtattgggggttgagttataagtagtatttggaagaagatgtttttgttgaggttaagttaggagagaggtttttagtgggga

SEQ ID NO: 79 - DNA, 5690 bp, Artificial Sequence
  chemically treated genomic DNA (Homo sapiens)
  unsure (381, 706, 711, 1115, 1134, 1206, 1226, 1370, 1382, 1390, 2064)
  unsure (2069, 2295, 2337, 2352, 2354, 2361, 2555, 2671, 3057, 3171)
  unsure (3186, 3188, 3522, 3568, 3584, 3586, 3591, 3616, 3840, 3846)
  unsure (3912, 3999, 4319, 4577, 4600, 4626, 4629, 5299, 5306)
aaaatattttaaatttaatattttagtttaggagttggaagtttgtttttttattgagtattatttaatattttttgtttttgttatttaagggtaagttatgtgtgtgggttagggttgggcgtcgattaggataggttatggatatttgtgtattttgttagaagttcgtgttaggtttttataatggttaaacggtgttggttagaataatatgggttgattaaaggaaggtgtgtggggatgaatttgatagttaatggtattagtgtatattttaagaaaaagggagggggtaatttgagtgtttttaggattttttttaaaggcgtagattaaaataagttaagtagtcgttgggtaggttttagtagttagggntagtcgggttttgagtttagggttttttggagaatcgtttaatattgatttgtgagtaaggtgtttttttatcgatcgttattgattttttttttattttttaagataatgatcgtttgggatgaaattttttttttttgtattttagttaagaagtaaatttatttttagaatttaagaaagatttttaaatatttttaatttgaaaagttttaattttaagtaattttaaataaaattttttatgagtaattaaatatttaaaatgtgtttttttataaaagtgaattagtttagttttgtaggttgaaaatataataagganggatntcgggttgtagaaagtagagggttatttagatcgtgtttgagagacggggagaaagtagttgtttgttgtgtattagaggtttttagggatttcggtagtaatttcgtggcgggttatatttgggagttgatttgtttttagaattattagttaagttatatgagttaggagtttggttatttatttaaagtttataaatgtttattgaagcggaatttagaggaaaggtttagagggaagggttttttttttttttgattttgaaagagatttattgtagtttgaggggttggatggaaagatttagataaaaattataaaatagagaggataaaaggttataattagtgtttatggtatggtagaaagtttgtttgtttttgagtttagaaagttgtattgngaattttgtaatatatttngtttattttcgaggtttacgttgagttttagtgttttttttaggacgaggttggggttagtggagtattttngtcgtgtttttttttttaantttttgtacgttgattttggttttttgattgttttttttgttttcgtttaataaggtattttttatataggggttttgttatagaatgaattttgttttgttatttatttattttaaaattattattggttatttttttcgagnagtttagtttgnttagaagntatttttgtttatagggttagttttatattttttagttttttgggacgtggtttggtttgaggttttggttttaatgtttattatagtagttagattaggtgggcgtagttttttaatgttttttgtttgtttttgttttgttttttttttttgttttaataatttatttaggtttaaattgttaagtaagagtaattatttttaaaggttgttgtgagtaaggagtgtataagggaagttatttgacgtatttattatagtttttggtatggttagtattatttgtttatttgttattattgttagaattattattagaattgtttattatggttaggtatggtggtttataattgtttattatggttaggtatggtggtttatatttgttattttagtattttggaaggttaaggtagatagattatttgagtttaggaatttaaagtttgggtaatatagtaagattttgtgtttataaaaaaatttaaaaattagatgggtatggtagtatatgtttgtagttttagttattggggaggttaaggtaggaggattgttttagtttagaaggttaagtttgtagtgagttgtgattgtattattgtattgtagtttgggtaatagagtgagatttagttttaaaaaaaaaaatgaatgaattgtttaatantattntattattttttaagattcgttttttttaggaggttttattttatcgtttatattagtgttttttaggttgggttaggtttgggttttaggttttttggtatttaagtttgttttttattttaggattcgttatattatattgtaatgtatatatttgttatgttttattgataaatttatattttatttttgttttttatattattattttaatagttattattgntattgatgtttaaatttaatgaataaatgaatatatttattnttatagtgggtatantnagatgtntagtttattgttaagtttttttttgaagatatttgatgatgatgttaatttagtagtttgtttttataggtttggaagttttgattattataatagttattttttatttaatttgtgttttttttgttatagtttttatttatattatttgtttttaatttaaagtagagtttatagttgattgttattattantttatattatttggttgtattggttttaaggttttttatttattttagaatattgattgtttcgttgtagtttgattttaataatttttattaatttgtttcgaaattaggagggntttgattttttttataaataatgttttatgtatatgtttttagaaaagaggttggggtttgaattttttagatatggtttagttgagttttttggtttcgtttatttttagtttattagggatagtgatatgggttaaaattgttttaaaatatttttgacgagtatttttttgttatttcgtttttttggggtggaatgagtattgtagtagtttcgtgtagagaaggatatgagtagtttaatattttttggaatttttgataattttttgacgatgtttgtttattatttttattttttttttagttaagtgattttatttttttaatttttttttaaaagattattaatttagtaagtggaaggaaatgtttataatattgngagaaggtaaagaatgggttgattttattttaaatggaggaagatgtagtaggatttgtgggtggggttattttttaggtgaagggaggggttaaatatgaagatttttatttngtatgtaaattttangntgatgtatattgtttagagaaaacgtttaattttttgattaattatgaatttgttttgaaaacgttgatttttattaggtgataaattagaaattttagggtattttaggagtattttttaggaataaattttaaggagtgatatttaaattaatgaaaatgtgttttttttttttttttgaaatggtagcgataatattgaaaattaagaacggtaatgataggagatttttaaaagtaaagtatttttgggtaatataatcgtaaaagataatttatagaagtttagttattttaataatttatatagtattttcgtgtttggtaggttgtnaattttgttttgttttggtaaatgagttagttagaagttagaaagnaaaagttgatttttantnatttntgtagttttataaagttaattaatntaaattaataaggattagttaatgtttgtatttttttttttttgtttttttgagtattataaatttaaagtagttgtgtgtttttttttatttaatttttggtttattagttaaagtatatgtagttagtaaattcggtggttgagatttggtttttttaagtttaatttagaggtttttagaggtaaaaaaaatttgtgttaattaaataagttaattgaggntcgggntgtgatggtttatatttgttattttagtattttgggaggttgaggttatagttttgtgaggtgggnaggattgtttgagtttaggagtttaagattagtttggataatatatgagatattgtttttataaaaaagtagaaaaattaattgggntgtgttggtatatatttgtagttttaattattttggaggttgaagtaggaagattattcgagtttaggagtttaatgttgtggtgagttacgatgatgttattgtattttagtttggtgatatagtaagattttgattttaaaaaggtaataagttaattaaaacgttatgttagtttttattttagagaaagaggtttgttttttatgatgttatggatatttatgaattgtgtatatgtttttatatattttttttttatttatgatgagagtgaaataattttatttatttatttaatgaattttaattagaatttnttatgtgtttgttttagttagatgttgggaaataatatagtgaataagagatatcgggttggaggaagaagtagaaatagttatagatatttattagatatttatttttattttaattttcgtttttattttgagtttagttttgagtatttttttgttttatcgggaatttatatagggtagggtaggaagatgaaggaggaaatagttttttttaattgaaaggtttaattataaaagattttgtataattaagtnttagagtgagggattttttattnatagtcggaagttggatagtttgaantanttaaggttttcgttaatattttttcgttagtttcgtatttattgtattgtattttatttattattttagttgggttcgcgtttcgtttatttcgcggggattggttgcgaacgcggaagaattaagtttacgtttcgcgttcgcgtttattaatggaagcgttcgttcgttttgatagacgtgttatttttcgttaatggggacgaagggaagttttagcgtgtggtttcggcgagtgcggataaaagtcgtttcgtcgggttcgggttttattttgagtcgagttcggtgttaagcgtagttagtttagtaggcggtagcggcggtttgagttttagggtagttagttttttttcggtttcgttttttttcgcggttagtatgaaagtttttagtttcgtgaggttcgttaggaaaaatagtttgtcggattatagtttgggtatttttcggagtaaaatttttgtggacgattcgatgagtttgttatataatatgaacgattgttattttaagtttaaggagttggtgtttagtattttttagaataagaaggtgagtaagatggaaattttgtagtacgttatcgattatattttggatttgtagatcgttttggattcgtattttattattgttagtttgtattattagagattcgggtagaatntaggcgntttaggacgtcgttgattatttttaatacggatattagtattttgtttttgtaggtaagatttgtttcggggttttcgtttcgtcgtcgtatattttcgcggtcgtttgggttgttattaggagattcgtagtttagacggtgattttcgtatgagttatttaattttattttttttagaatttgttgtagattgagttgtgcgtgaaattgttagtaagttttgatatgttaatgcgtttgtttttaaatttgaattgttattataaacgtgtttaatggaatttgttggtttgtggattataaaaaaaaaaaaaaaaaaaaaaaaattttttttatttaatattgttttaatttcgtattttttattttttttttttttagg

SEQ ID NO: 80 - DNA, 5690 bp, Artificial Sequence
  chemically treated genomic DNA (Homo sapiens)
  unsure (385, 392, 1062, 1065, 1091, 1114, 1372, 1692, 1779, 1845)
  unsure (1851, 2075, 2100, 2105, 2107, 2123, 2169, 2503, 2505, 2520)
  unsure (2634, 3020, 3136, 3330, 3337, 3339, 3354, 3396, 3622, 3627)
  unsure (4301, 4309, 4321, 4465, 4485, 4557, 4576, 4980, 4985, 5310)
tttggaaagaaagaggataaagagtacgaggttaagataatgttaagtagaaagggtttttttttttttttttttttttttgtagtttatagattagtaagttttattaaatacgtttatggtaataatttagatttaaagatagacgtattaatatgttagaatttattagtaattttacgtatagtttaatttatagtagattttgaagaaaataaagttaaatagtttatacgaaagttatcgtttgggttacggattttttagtgatagtttagacgatcgcgggagtgtgcggcggcggggcggggatttcggagtaggttttatttgtaaggataggatgttgatattcgtgttgagggtggttagcggcgttttggancgtttgngttttgttcgggtttttggtgatgtaggttgataatagtgggatgcgagtttagggcgatttgtaggtttaagatgtagtcgatgacgtgttgtaggatttttattttgtttatttttttgttttgggggatgttgggtattagttttttgagtttggagtagtagtcgtttatgttgtatagtaggtttatcgggtcgtttataggggttttgtttcgggagatgtttaggttgtggttcgataggttgttttttttaacggattttacgggattgaaggtttttatgttgatcgcgagggaaggcgagatcgggagggagttggttgttttgaagtttaggtcgtcgttgtcgtttgttgagttagttgcgtttggtatcgggttcggtttagaatgaagttcgagttcggcggggcggtttttattcgtattcgtcggggttatacgttggagttttttttcgtttttattggcggaaggtggtacgtttattaagacgagcgggcgtttttattggtgggcgcgggcgcggggcgtgggtttggttttttcgcgttcgtagttaattttcgcggggtgggcggggcgcgagtttagttggggtggtaaatagagtatagtatagtaagtgcggggttggcgggggggtgttggcggggattttggntgntttaagttatttaattttcgattgtnggtaggaaattttttattttaanatttaattatataaagttttttgtggttgagttttttagttagaagaggttgtttttttttttatttttttattttgttttatgtggattttcggtgaggtaggaagatgtttagggttgagtttagggtgggggcgggggttggggtgggggtgaatatttggtaagtgtttgtggttatttttgtttttttttttagttcgatgttttttgtttattgtattgttttttagtatttagttgggataagtatatagnaagttttagttaaaatttattgaatgaataaatgaagttattttatttttattataaatgaaaggaaaatgtgtaaagatatatatataatttataggtatttatgatattataagaaataggtttttttttttggagtgaaggttgatatgacgttttgattgatttattatttttttagagttagggttttgttgtgttattaggttagagtgtagtggtattatcgtagtttattatagtattgaatttttgggttcgagtgatttttttgttttagtttttagaatagttgggattataggtatgtgttaatatantttagttaatttttttatttttttgtagagatagtgttttatatgttgtttaggttggttttgaatttttgggtttaagtaattttntttattttataaagttgtaattttagttttttaaagtgttgggatgataggtatgagttattatanttcggnttttaattgatttatttaattggtataaattttttttatttttagaagtttttaagttgggtttgagaaagttaggttttagttatcgggtttgttgattatatatgttttggttaataggttaaaggttgagtggggagaagtatatagttgttttgaatttgtggtgtttaaaaaagtagggagagaaaagtataaatattagttagtttttgttgatttangttggttggttttgtaagattgtangggtngntagaagttagtttttnttttttggtttttgattgatttatttgttaaagtaagatagaattngtaatttgttaggtacgaaggtattgtgtgaattgttggaatggttgagtttttatagattattttttgcggttgtattgtttaaaggtattttgtttttggaaattttttattattgtcgtttttaatttttagtattatcgttgttattttaaaagggagggagaaatatatttttattagtttgaatgttattttttgaagtttgtttttggggagtgtttttaggatgttttgaaatttttgatttattatttaatgaaaattagcgtttttagagtaagtttatgattgattaagaagttgagcgttttttttgggtagtatgtattantntgaaatttatatgtnaaatgaaaatttttatgtttagtttttttttttatttagaaaataattttatttataaattttgttgtatttttttttatttaagatggaattagtttattttttgtttttttntaatgttgtgagtatttttttttatttgttgagttaatgattttttggagaaaaattaaggaaatagagttatttaattgagggagaggtgggggtgatggataaatatcgttaaggggttattaaggattttaaaaggtattaggttgtttatgtttttttttgtacgaaattgttgtagtatttattttattttagaaaagcgaagtggtaagggagtgttcgttaggagtgttttgaagtagttttggtttatgttattgtttttaatagattgaaagtgaacgaagttaagaggtttagttgaattatgtttaggaaatttagattttagttttttttttgaaagtatatgtatgagatattatttgtagagaaaattaaantttttttgatttcggaataagttggtgggaattgttagggttaagttgtagcgagatagttagtgttttgaggtagatggagagttttagagttagtgtaattaggtggtgtggantggtggtgatagttaattatgggttttgttttaggttgaaggtagatgatatgagtgaagattgtagtagagaggatataggttggataaagagtaattattgtgataattagagtttttaagtttgtgggaataggttgttgagttaatattattattagatatttttaagaaaaggtttgatagtagattanatatttngntgtgtttattatggngatagatgtgtttatttatttattaaatttgaatattaatgntagtggtaattattaggatagtagtatgggaaataaagataaaatataaatttgttagtgaggtatgataaatatatatattgtagtataatatggcgagttttaagataagaggtaagtttgggtgttaggaagtttggggtttaggtttaatttaatttggggagtattggtatgggcgatgggataagattttttggggaagacgagttttaggagatggtanggtgntgttgggtaatttatttatttttttttttgagattgggttttattttgttgtttaggttatagtgtagtggtgtaattataatttattgtaggtttgattttttgggttaaagtaatttttttgttttagtttttttaatagttggggttataggtatgtgttgttatgtttatttaatttttaaatttttttgtagatatagggttttgttatgttgtttaggttttgagtttttgggtttaagtgatttgtttgttttggttttttaaaatgttgggataataagtgtgagttattatgtttggttatgatgggtaattgtgagttattatgtttggttatgatgggtaattttaataataattttaatagtgatgataggtaagtagataatattggttatgttagggattgtggtaaatgcgttagatggttttttttatgtattttttatttataatagtttttggaggtgattgtttttatttggtagtttgagtttaggtaggttgttgaagtagagagaaagggtaaggtaggaataggtagggggtattgaagagttgcgtttatttggtttggttgttatgatgagtattaaggttaggattttaggttaggttacgttttaaaggattgaggagtgtggagttgattttgtgggtaggagtgntttttgantaggttaagttnttcgaagggagtgattagtggtgattttggagtaggtgggtaataaggtaggatttattttgtagtaagatttttgtgtgaagagtattttgttgggcgggaataggaggaatagttagggaattagaattagcgtgtagaagnttgggagggaggatacggtnagggtgttttattagttttaatttcgttttgaggaagatattgaggtttagcgtagatttcggaaataagtnaggtatgttgtaggatttntagtgtagttttttggatttagaggtaagtaggttttttattatgttatagatattgattgtgattttttgttttttttgttttgtgatttttgtttaaatttttttatttagttttttaggttataatgggttttttttagggttagagaagagagaaatttttttttttgaattttttttttaagtttcgttttagtaggtatttgtgggttttgaatggataattaggtttttggtttatgtggtttagttggtggttttgaaaataaattagtttttaagtgtggttcgttacggggttgttgtcggggtttttagaggtttttggtgtatagtagatagttgtttttttttcgttttttagatacggtttaggtggttttttgttttttgtaattcggnatttntttttgttgtatttttagtttgtagaattgagttgatttatttttatggaaaaatatattttaaatatttagttgtttatggagagttttgtttaaaattatttgaaattggaattttttaaattggagatgtttgaaaattttttttaaattttgaaaataagtttgttttttggttaggatgtaagaggaagaaattttattttagacgattattgttttgaaaagtgaagaaggagttagtagcgatcgatgagagggtattttgtttataggttaatgttgggcggttttttaggaggttttgggtttagggttcggttgnttttgattgttgggatttgtttagcggttatttggtttgttttggtttgcgtttttaaagaaagttttgggagtatttaagttgtttttttttttttttttgaaatgtatattaatgttattaattattagatttatttttatatatttttttttgattagtttatgttattttggttagtatcgtttggttattgtagaggtttagtacgagtttttggtaggatgtataggtatttatagtttgttttggtcggcgtttagttttggtttatatatatggtttgtttttaggtaatagagataaagggtgttgagtagtatttagtgagaagataagtttttagtttttgaattgaagtattaagtttaaaatgtttt

SEQ ID NO: 81 - DNA, 6053 bp, Artificial Sequence
  chemically treated genomic DNA (Homo sapiens)
atttcggttttttataatttttattttttaggtttaagtaatttttttgttttagttttttaagtagttgggattataggcgttcgttattacgtttggttaatttttttatttttagtagagaaggggttttattacgttggttaggttggtttcgaatttttgattttacgtgatttgtttgttttggttttttaaagtgttaggattataggtgttagttattttgtttagttttaatatttttaaatattgtttaaaatatttagatattataggtaatttttagtaaaaatgataaatattaaatttattaagtaataaatttacgatttagattggtgtttatttgaagttttagaaggattatatttttttggaataaaaagaatgaagtgagtaattaaaggatggttatttagattgtaaaatgtttatgtaaaatatttttaaataaatgtaaattaaataatgaaatataattttttaattattaaattggtaatatttttaagtttaataatatgagatattggtgattataggggaaataagtatgtgtatatgttgttggtaggattataaatttatacgatttttttgaagggtaatttggtaatatttttttagtattgtaattatattgttaagtgatttaataattttaatgaaaggaatttatattataggtataattttgaggaatatacgaatatataagtatatatttgggaatgtttattatagtttggtttgtaatggtaaaaattggaaaaaaatgtttatcgataggggattagtgaaataaattaagatatttttatattataatataattttaaggttaaataatgagttagagttttatgttgatatagaaatagttttaaaataaagtgaaaaatataaataatgagtagaggtagtttatgattttatttgtgaatagtttttagaaaagagaatgagagaagagtagaaggatgaagtatttttaaaagatgacgattagggaaaataagttgagaaaaaaaaggaaataaaaagaagagagaaaatgtaaattttttggtttatagttagttattttttgtattttaatattttttgtataattaataatgttaaattttttttttttgtaagttacggtttttaaggtggaattaagaaattgatagatagataaagaaagtataatattaaaagaggtatttttttagttttatttttgtattaagattattgaagataaattaaggattaaaaagttttatatttttatttttaaaatattttatgattagtataaatttattttaattaagaagttattgtttttggtaaaaagaatatttgttttgttatagaggtatacggtaaagtttagatatttgtattggtttttgattttattatttttaatttatataattataattttttgggattataagattattttttttagaatttttttgataggttaagagagtaagggtaaaggtgagggtatagtaggtagtagattttttatttagattagaaaattaaggaagaaaaaatagggattgtataaatataagaagaaaagggttatggttagttaaataaaatgattttttttgtgcggagttttattattatagagttaagtatttttatgaagtaagttaaaagaaagaagaataatttttgagtttacgaggtgtttattaaattgtatttatgaattattagtttaaatgtttaataaaagtagtgtattttgatttttaatgatttatagtttttgaattttttaaagtataataattttttagtttaatttattattatttattatagagattgaagtggtggggtgggtaagggagagagagatggagagagggtgagtgttgttaagtattttgaggagatagggatgaggggataaatatagtgtgtttagataatggaaatatagtgaaaggtttatgcgtttttgtttatatattttatttgatttatgttttatagtttggaaataattttgatagtttaattttataattaggagagatggagagagattatttttattttatagatgagaaaattgagttttagagagggatagtaatttgttaagattatatagtaagtggaaaaagtataataagaatttaggtttttagatttaaattttgtgttttttttttatttttttttagttttattttttttattgttaagggtagggaagttgttagggatagaaggttggaatgggattttaggataagattgagtagagatttgaatgtggggttgaatgtaggggagtttagaaggtttttgggtggtttcgagtgttagggagattattcgagttagggagattattttagtgtagaggtattattttttttatttatttgggtaaggtaaggaggtttaaggggaggttggggtaataatagtttggttttggattatgaaattataattcgatatagggaaggaagatttagaagattaggtgggaaagaaaagggttggtttcgaattaataagagtttataggagtttatgtgttttgttggggattatagaatgttttatattttagaatgtgatttattaaaagttattataataaaaatgttgggtatttaaatatggtttagttttattttattgatttggagtatagtatttttagttataataagtatatttttataggttttaaaataaagtaagaatttttaaggttaaaaaaaaaaaaaaggttaaagatgtaaatgtaaatgatagttttattggtaaattttaattggggaattttttttaagtaaaaaattattgatatgtataaagatttagttaatagtgttgtttgtattacgaaaaaatggaaataatttaattgttttataataggggattaattgggtaaatttttatttatttttgtgaaagaataatgtatatttattataaatgatattgtataagtatattttatgatatggaaagatgtttattatggttaaatatatatatgtatatacgggtatatttatatttgtatttgtgaattaaaattaagtttttgttttaaagtattttttatagtgttttgttgtttttatagggttattgtggttaatttattagattataaagatgtaaattttttttttttaattttattttgaattttttagtggatgtgttaggtttttaggggaaggataagtatttatttgttgtattaagaaaggattttacgatttaggggttatttgtttttttttatttttgtttagaaggttttggtttttgtagtaagtttttatttttatttgttatttaaagtattttaaaatttatttttttattttagagtgttattgttttttattttgtttaatatttagttaggttttttttttagttttttttattttttttttttttttagtttttgatttatttttatttggtagatagttttgtttatttttgttggtattttgggaattaggtttggtattggttatagtatttagattgtaatgcgttagaatgggattaatttatgtattttttttacgggagggaggtagagtgattggtaagtcgaatgttgtatgggtgtgtttatttatagtttgtaaaatggggtgttgttttggagggagagttggggtgaaggaaatgatacgtttgggagagtaatttatttttgtaggagttttagggagatgaaggaagaagttttttgggttagagttttggatggaaaatgaatatttagttaagtttttaggattatacgtggggcggggattagttgtgcgcgagagttaagtaggggttttattaaggagtatgggatttgggttttttaattttttggttagttttatggcgttgattagttttgagttaatttttttatgttgtttagaatttttttgggttaagttttggggatttagagatgatagtaatgtttttattgcggaatttttatacgcgggttatagggaggttttggaggcggtttgaggtaagagtgttaggagggattagagttagtttatttttatttttatttagtcgtttgggtttttttgaattttttttttttttttgttttttaaagttagttagggggagttttagggaggtagatcgaaaaggggtggggtgttattttggttattattagattttgtaacggcgattttgaaaattatttagcgtttgttgttcgagtggagtatagtgttttataatttttttttattatagtaaattattaaggtagggttattattattttatggttgaaaaatagaggttttgcgttttttgggggttgtgttagtagcggttaagttgggattttttttggtttagtagttttagatagtatacggggtagggtaggttttttgttttttttatttttttagggtaggtgagtgatttggagggagggggaagtcggagtaggggtggattgggagcgttcggggcgggttcgcggtggtttcggggcggtggcgttcggtcggagagggtggggcggagtagtcgttttgtatttttttttcgtcgttagttttataatagtttgattttttcgaaatgacggtacgtagtcggttaatgggcgttcgcgcggttgttcgggggcggggtcggttagggttggggaatttcgttaagtgtttggattgttcggtggcgtcgttgttttggtagagttcgttattttttagtcgaggtaagacgtgcgttcgagtttcgtcgaatcgaggttattcggagtcgtgtttagtttacgtcggtcgtgttcggcggttttaagaattcggtaatttttgttttttttttttttttattcggagtcgcgtttcgcgcgtttttattgtagtttttgcgtcgtcgggattttcgcgcgcgatcgtcgaatcgtttttgtagtagaggtgagtacgtttttgaggcgcggggtatcggcggcgtcgaataaaaggcgcgcggggtattaggaagtggggggtcgaaagttttaggttggagattcgtcggcgcgcggcgttgttcgggttttcgcgcgggtttcggggggcgtcggaggagttgcgagtcgcgggtcgcggcgcggggagggcgggacgcggcgtggatcgtttattcggacgaggttgtcggcgttcggtagtttttgtagatttgcgtgcgcgtagtcgttaggggtttgtaggtggttcgttatgttcgtttcgcgtatttatacgtcgtgtcggggatcgagtgttagtttacgcgtgggcgtttagtgttttcggttttcggcggttttagtttcgcgtttaggcgataggttttgggttttttgtgttggtggtaagggttggtttattgtttaggtggttggagggaatcgtgatttacggagattgcgggaagaggcgttataggtgttttttgggttatttttttagaggaggggaaatcgggtcggaagggttagcgttttggttttagcgttgtgggcgttgtggttgttaggaaggcgtagaatggatttaggggggcgggagggggttgtttagggtgacggttagttttttgttagttagtggttataatttaagttaagggaatttttttttggtattaagtaaaagaagtttttttttttttaaaggatttgaattttgagcgaaaagttttgaaattagggtatttgtgtattttgtttttttttttgtatatgaattttgaagttattatttgtatgtttgttttttttagagattggttgggaggggttgaaggaaggggtaaaagtatttttgtttaagatgttgaaaaaatttggagagtagttttattttagcgtagttttttttcgtattgagtgtagtatttagtagttggttgaggtgaggggagggtaattaagtgatttcgggtggggtaggttattgtttaggtattgtttaatagattttagattggagtttttgtgttttttttatagt

SEQ ID NO: 82 - DNA, 6053 bp, Artificial Sequence
  chemically treated genomic DNA (Homo sapiens)
gttgtaaagagaatatagaggttttagtttggaatttgttgaatagtatttgggtagtgatttgttttattcgaggttatttagttattttttttttattttagttagttgttaggtattatatttagtgcggaggggagttgcgttggaataaaattgttttttaaatttttttagtattttaggtaaaaatgtttttgtttttttttttagttttttttagttagtttttggaggagataggtatgtaagtgatggttttaggatttatatgtaggaaaagagataaaatgtatagatattttaattttagaatttttcgtttaaaatttaaattttttgggaagggagggattttttttgtttgatgttaagaagaaatttttttgatttgagttgtaattattagttagtaaagggttagtcgttattttgaatagttttttttcgtttttttgaatttattttacgtttttttgatagttatagcgtttataacgttaagattaggacgttaattttttcggttcggtttttttttttttggagaagtggtttaaggaatatttgtggcgttttttttcgtagttttcgtaggttacgattttttttagttatttgggtagtaagttagtttttgttattagtatagggagtttaaaatttgtcgtttgggcgcggagttgggatcgtcgaaagtcgggagtattgggcgtttacgcgtgggttgatattcggttttcggtacggcgtgtggatgcgcgggacgaatatagcgggttatttataggtttttggcggttgcgcgtacgtagatttgtaaaagttgtcgggcgtcggtagtttcgttcgggtgggcggtttacgtcgcgtttcgtttttttcgcgtcgcggttcgcggttcgtagttttttcggcgtttttcggagttcgcgcggaggttcgggtaacgtcgcgcgtcggcgagtttttagtttggagttttcgattttttattttttggtgtttcgcgcgttttttattcgacgtcgtcggtgtttcgcgttttaaaggcgtatttatttttgttgtaggagcgattcggcggtcgcgcgcgagggtttcggcgacgtaggggttgtagtgagggcgcgcggagcgcgatttcgagtggaagagggaagaaggtagaggttgtcgggtttttaaggtcgtcgggtacggtcggcgtggattgggtacggtttcgggtggtttcggttcggcggggttcgggcgtacgttttgtttcgattaaggagtggcgagttttgttagggtagcggcgttatcgagtaatttaaatatttagcgggattttttagttttggtcggtttcgttttcggatagtcgcgcgggcgtttattggtcggttgcgtgtcgttatttcggggaaattaggttgttgtagagttagcggcgaaggggaagtatagggcggttgtttcgttttatttttttcggtcgggcgttatcgtttcggggttatcgcgggttcgtttcgagcgtttttaatttatttttgtttcggtttttttttttttttaggttatttatttgttttggggaagtgaagaaggtagaaagtttattttgtttcgtgtgttgtttggggttgttggattaggggaaattttaatttggtcgttgttggtatagtttttaagggacgtaggatttttgttttttaattataaaataatagtagttttattttgatggtttgttgtgatgggaagagattgtaaagtattatgttttattcgggtaatagacgttgagtagtttttaaggtcgtcgttgtagggtttaatagtgattaggatgatattttattttttttcggtttgtttttttgggattttttttggttggttttagggaatagaggaggagaaggggtttagagaagtttagacggttgagtgagggtaggggtgggttagttttgattttttttagtatttttgttttaggtcgtttttagagtttttttgtggttcgcgtatgggagtttcgtaatggaagtattgttgttatttttgagtttttagggtttggtttagagaggttttgggtagtatggaggaattagtttagggttgattaacgttatggggttagttaaagggttggggagtttaggttttatgttttttggtaaggtttttatttaattttcgcgtataattagttttcgttttacgtatagttttagagatttgattgggtgtttattttttatttaaaattttggtttaggaggtttttttttttatttttttaaagtttttgtagaagtaagttatttttttaggcgtgttattttttttattttagttttttttttagggtagtattttattttgtaggttataaatagatatatttatgtaatattcgatttgttagttattttatttttttttcgtagaggaaatgtatgggttaattttattttggcgtattgtaatttgagtgttgtgattaatgttaaatttggtttttaggatattagtaggaatgggtaaaattgtttattagatagaggtgggttaggagttaggagaggaaaggaggtaggagaaattgaggaaggaatttaattgagtgttaagtaaagtggagggtaatgatattttggaatggaaaggtgggttttggggtattttaagtgataaatggaagtggggatttgttatagggattaagattttttgagtaagaataagagaaaataagtgatttttgagtcgtgggatttttttttggtatagtaaatagatgtttgttttttttttgagaatttgatatatttattggaaaatttaggatgagattagggaaaggaagtttgtatttttgtggtttgataagttgattatagtgattttgtgaaggtaataggatattataaaaaatgttttaaaataaaaatttaattttaatttatagatataggtataaatatattcgtatatgtatatgtatatttagttataatgagtatttttttatgttatgaaatgtatttatgtaatgttatttgtaataggtatatattatttttttataaggataaataaaaatttatttaattaattttttattgtaggatagttaggttatttttattttttcgtaatataaataatattattagttaaatttttgtgtatattaataattttttgtttaggagaaattttttagttaggatttattaatgaaattgttatttatatttatatttttgattttttttttttttttaattttagggatttttattttattttgaagtttgtaagaatatgtttattatgattaggggtgttatattttaaattagtgaaataaagttaagttatgtttaagtatttaatatttttattgtaatggtttttgatgaattatattttaagatgtagaatattttgtgatttttagtagaatatataggtttttgtaggtttttattaattcggagttagttttttttttttttatttggttttttgggttttttttttttgtatcgggttgtgattttatagtttaggattagattattgttgttttaatttttttttgggtttttttgttttgtttaggtagatggggaagatggtgtttttgtattggaatgatttttttaattcggatgatttttttaatattcggggttatttaggagttttttgagtttttttatatttagttttatatttaaatttttgtttagttttgttttggggttttattttaattttttgtttttgatagtttttttatttttggtagtagggaagatgaaattaaagggggatgaaaagagaatataggatttgagtttgaaagtttgggtttttattgtgttttttttatttgttatgtgattttagtaagttattgtttttttttggggtttagtttttttatttgtaaaatagagataatttttttttattttttttaattgtaaaattagattattaaaattatttttaaattgtaagatataagttaaatgaaatgtatgaataggaacgtatgaattttttattgtatttttattatttgaatatattgtgtttgtttttttatttttgtttttttaggatatttggtaatatttattttttttttattttttttttttttgtttattttattattttaatttttgtaatgggtagtagtgggttgagttgaaaaattgttatgttttaaaaaatttaagaattgtaagttattggagattaaaatatattatttttattaagtatttgaattaatagtttatgaatataatttgatgggtatttcgtaaatttaagagttattttttttttttttaatttattttatgaagatatttggttttatgatgataaaatttcgtataagaagggttattttatttagttgattatggtttttttttttttatatttgtatagtttttgtttttttttttttggttttttgatttgggtagaaaatttgttgtttgttatatttttatttttatttttatttttttggtttgttagaagaattttagggaagatagttttatggttttaagagattgtggttgtgtagattgagagtggtaagattaggaattaatgtaaatgtttgggttttatcgtatatttttgtaataaaataggtattttttttgttaagagtagtaattttttaattaaggtagatttgtattagttataaggtattttggaaatgaaaatgtggaattttttgatttttagtttatttttagtgattttaatgtagggataaaattagaagaatattttttttgatgttatgttttttttatttgtttattaattttttagttttattttaaaggtcgtagtttataggaaaaagggatttgatattgttaattatgtagaaaatgttaaaatgtagaaaatagttaattataggttagagaatttatatttttttttttttttttgttttttttttttttttagtttgttttttttagtcgttattttttaagaatgttttatttttttattttttttttatttttttttttgaaagttgtttataaatgggattataagttgtttttatttattatttgtgttttttattttgttttagagttatttttatattagtataaagttttagtttattgtttaattttaaaattatgttataatatgaaaatattttaatttattttattagttttttatcgatggatatttttttttagtttttgttattataaattaggttataataaatatttttaagtgtgtgtttgtgtgttcgtgtattttttaagattatatttgtaatgtaaattttttttattggaattattaagttatttagtaatataattatagtattgagaaggtattattagattgttttttaagaagatcgtatgagtttatagttttattagtaatatatgtatatgtttattttttttgtagttattagtattttatattattgggtttgaaggtgttattagtttggtggttgaagaattatattttattgtttgatttatatttatttgagggtattttatatagatattttatagtttaaatagttattttttagttgtttattttattttttttgttttagaaagatataatttttttaaaattttaaatgggtattagtttaaatcgtaagtttattgtttaatgagtttaatatttattatttttgttaaaagttatttgtaatatttaggtattttgaatagtatttagaaatattgaggttgggtagggtggttgatatttgtaattttagtattttgggaggttaaggtaggtagattacgtgaggttaggagttcgagattagtttggttaacgtggtgaaattttttttttattaaaaataaaaaaattagttaggcgtggtggcgagcgtttgtaattttagttatttggaaggttgaggtaggagaattatttgaatttgggaggtggaggttgtagggagtcgagat

SEQ ID NO: 83 - DNA, 6071 bp, Artificial Sequence
  chemically treated genomic DNA (Homo sapiens)
  unsure (3292, 3454)
tagtttgtaggtggttgtttttttgttgtgtgtttatatggttattcgtttgtgtgtgtatacgtgtagtgtttgtgtttgtgttttagttttttttttttataaggatattagttaaattggattagggtttatttttttgatttttttttattttaatttttattttaaaaggtttatttttaaatattattatattttaaggtattgggggttagagttttaatatgtgagttttagggagatatagttgagtttataatattttttatagaataattaagtttgagatatgttatatgttatattttttttttggaaatttgtaaggtatatatgtatatgaatgattgtgtaaagttttggaaaatatttagtatttattttttatattttttttgtttgatttattatttattgataattttttattggttttttttatgtattggttgagtgtattgagttgtcgtatggaaatatgatttgtcggttgtcgttggtagttaggaagggaaggtggatatggagagagtaagtaaaagttggagttttaaggagatgaagtggaatttagggttgtattttattagagcgtatgttggttttttattatttttaggttttcggttttgaagatgttcggggagttgttttggagggttacgtggagagaatgggattggtaagtgggtaagagggttggtttttgttggatggaattgcgttttttattttttttaaggggatttttggattgttaggggtttggtatgttttgttttatttatatttgttggttagggtgagtggttttttatttggtttaattttgttgttttttttgttgtgttttttgtgggtgaggaaaagagtagagttgcggatgttattggagcgtggttaggttgggtgaggatttatatagaaaagtgtgggtaggcgtggtgggtgggggcgggggataaggtatgggttttgggtagttagttagtgttttcgttacgttttggttttaggtgtttagtattagtcgtgtgtatattttatttcgtaggtttttttcggttgttggtttattttttgtatgttatttttatttttttgattttttgtttagtttagttattttagtttcgagtttcgtttttttttttgaatataattagaattttttttgttggttttggatttttatgttgaataatttttatggtgttggtttttttttaattttttgaattaaattttagatttattgtaagtttttagttaagtgaagattttcggtggtttttttgttattttggtattcgaggaagtagatgtttttttttttttttgtagtgtttttattatgaattatttttaggtttttttaataggattagttagttttttattttagttgtgttgtaattttggtatttttgtagtttggtgaagatgacggtgttttaatgaagcgtatatttttatagtaattggtttggtatatgtaaataggaatagtagtttttttttttgtaaggtacggtgtagattgttttttacgtattatttttgtttttcgtattattttttttaattcgaaagatagagtatattgttttaattttattaagtagaaaattggtttttagagagtagttttgtttagttagggtatgttagagtattgtttgggatttatattttttgattttagggttaaggtatttttgggtttttatacgggtattaatagagatatattttatgtttaaattagttttttggttaagtattatttttagttttttagaatttattgtatttttttttaaattttaatttaaaagttttatatagtatggtggttcgtgtttataattttagtgggaggttaaagtggggggattgtttgaagttaggaatttgagattagtttgggtaataaagcgagattttatgtgtaaaaaataaaataaatgaaaaattagttgggcgtgaaggtgtatttttgtagttttagttattttaaagtttaaggcgggagaattatttaagtttaggagttcgaggttgtaataagttatgattgtatcgtagtattttagtttgggtgatagagagagattttgtttttaaaaaataaaagaaataaaaaattagttgagtagggttgtatatatttgtagttttagttttttgggaggttgaggtaggagaattgtttgagtttaggaggttaaggttgtagtgagttgtggtcgtattattgtattttagtttgggcgatagagtaagattttgttttaaaaaaaaaaaaaaaaaagttttttagtaggttttgttataatattttttttggtatttattgtatttggtaattttgaaataatttttatagtgaattttatttattgaattgttttgggaaacgtatattttttaaattaaagttgttatattagtgtgagagttatgtttatttaggaggtttggacgtattttttttttggtttggttttgatttgttatttttgcggtttttttttttagaatttttttttttcgtttttgtttttatagtcggtttttattttatattttatagaatgtatttgtattttaagtaatatttttttaaattttatatatgttttttttttttatatatatttaaaagtaatatatttaaggatgtgttaatttaattaaatatttttgagatatttataaaattatgggagttgtttatggtggtattttttttttttattttgagatggagtttagttttgttatagtggtgtgatttcggtttattgtaatttttgttttttgggtttaggtgatttttttattttagtttttcgagtagttgggattataggcgtttattattatgtttggttaatttttgtatttttagtagagatgggtttttattatgttggttaggttggtttggagtttttgattttaggtgatttatttgttttggtttttaaaagcgttgggattataggtatgagtcgttatatttagttttgtggtgtattttttaagtagaattttgtgtttatgttatcgagaaagggttagtaaaatattttgtatttttttaagatttagtttaaaaagcgttgtaaaaatatttttttattagatttttaaataatttttaagaggattaggttggttggtattttatagatgaggaaataggtttagagtgggtgggtgatttggagtattttgtattgagtgggaggggaagttaatttttttgttttagtttttttanagtagttgggattagaggttatgcgtttttaaatttggttaattttgtatttttagtagagatggagtttttttttgttggttaggttggttttaaattttcgattttaggtgatttttttgttttggttttttaaaatgttgggattataggtatgagttnttgtattcggtttattttgttttttaaaaaaaaaaaaaagtgagtattataatagaggggataaggaataatgtgtatgtgaggtttatttttgagattagagttataaaatagaattttgtattttagttatttttttattatacgcgtttttttggatatttttatttttttagtttatataatttaatatttttgtgatagagaggtgttggagttttttgttttgtttttgttttttcgtaattttttatatataaatagttatggttttttaggaaggaattttttttgttgagtatagaagtttgggaaaagattggtgaaattgtatgcgaggaagaaataggtttaattaaatgtgaatttatatttttaaagtaagggattataaagggtaggttttaaggaagttgtattgtttgttgtatttgttatacgggttgtattttttttttttatttatttttatttatagcgttgaaaattgaggttttaggttttggttgaaaatcgaggttaagggtgattagttagtgagttaaggaggttttagtcgaattttgttggaagtgttttagtataaagtttttttttagaattagtcgttattgagacgttttgaagttaaagtaatttatatttttgtttatttcgttttgcggtgaagaaatttcggtcgtataggttttagaatttattttggcgtgggttgtgatttattgggggatgggtttttttttcgttttagtttttaaatggagcggagcgttaggtggtgttagagggggcggcggtttttttaatggtggtatttttagttacggataaggttttaattaggtaaggacgtaagtaatgttgtcgtttcggttgattgttttttttattttttggaggtggtcggtgttataaaacgaatttttatttatttttaatagttatattagttttgttaattggatggtcgtagtttcgtgttttcgtcggacgtttttttggaatttttaggttattttgaggatggagattcgggtgttcgttttttttttttatcgtcgcgggtttgcgtttttcgtttcggatttcgattcggacgttttagtcgtacgtgcgggcgtttttgggtgcgagtcgcggatttacgagtcgttgtttgttgttttcgtcgtcgcgatttggggaagcgaaaatgaaattgattttttcgagaaatgatgaaagcggcgttgttcgttaatgagttgttgcggcgaattttcgtatttttcggtcgggtcgttcgcgtttttttttcgtttttatttttcggttgtataagtttgaaataaatattggggaggaagggcggagggaggagggcggagaggggaggcgagggagggagcgcggtcggaggagggcggggggtggggggatttttagtcgcggtttttcgtagttttttttttttgttttgttttcgatttggattgtttttaggtaagtcggggagtaatttttagttttgtttttgcgattatttaattgacgggtttttatttttattttatatattttagtaatatttatattttgcggaattgtattggtagcgtgaaaaaagtatattgagaggtaatattttttaaataatagttgtgattgtgtgtgtttttttcgagggtatgtttttggggattgtggggggtcgtgtgtgtatgcgtgttttgatgttttgatacgatgttttgtagacggaaaatgtcggggtttataaatattaatattgatttttggaggaatagtcggcgtaattatggattatttgattttaggggaagtaggttttgttgttgttgttgttgttattggggttgttgaggttgcgaggaggaggaggaggaggaggtagagagggaggaggaggaggaggttggtggaggtttaattttatttttggatttgtagatgcggagaggtggttttatggatatagatttgttgtgtgtgtttttgcgttttaggtgttgtgtgtgggggtgtaggttagttggagtcgggttttatttaaaataaaattgtgtgtatgtgcgtgtttgtgtgtgcgcgcgtgtgtgtgtgtgtagttatcgtcgttatcggattcgaaggaggggagcgggtttttttcggtgttcgcggcggcgtttttttaggttgtttttagcgtaaataagtaggtatcgtttttcggtcgggaggagcgtttttagttacggttagaggaaatttgttggggcgtttcgcggcggtttaggggttcgtttgtttgtcgggttcggggtcgggtcgcgggcgtcgggtgttagcggtcggggcgggagggcgggttcggagtcgggtcgggcgtcgggtttggtcgacgcgttttgttttttgggggttgggtcgtcgtcgtcgtcgtttagaagggacgtcgcgttttttttttcgtcggttagcgttcggtcgggttttggggttttgttattgtatttgttttagcgcgttaggggttcgggcggcgcgttttaggaaggtatcgtgtcgaggggttagtcgttcgggtcgcggtttagcgtcgtgcgttttcgggttttcgtaggcgttttcggtt

SEQ ID NO: 84 - DNA, 6071 bp, Artificial Sequence
  chemically treated genomic DNA (Homo sapiens)
  unsure (2618, 2780)
ggtcgggggcgtttgcggggattcgggggcgtacggcgttaggtcgcggttcgggcggttgatttttcggtacggtgtttttttgggacgcgtcgttcgagtttttggcgcgttgggataagtgtaatgataaagttttagggttcgatcgggcgttggtcggcgggaaggaggacgcggcgttttttttgagcggcggcggcggcggtttagtttttaggaagtagggcgcgtcggttaggttcggcgttcggttcggtttcgagttcgttttttcgtttcggtcgttggtattcgacgttcgcgattcgatttcgagttcggtaggtaggcgagtttttggatcgtcgcggggcgttttagtaagttttttttggtcgtggttggaggcgtttttttcggtcggggagcggtgtttgtttatttacgttggaggtagtttggagaggcgtcgtcgcgggtatcgagaaggattcgtttttttttttcggattcggtggcggcggtggttgtatatatatatacgcgcgtatatataaatacgtatatatatataattttgttttaaatgaggttcgattttagttgatttgtatttttatatataatatttggggcgtagaagtatatatagtaggtttgtgtttatggagttattttttcgtatttgtaaatttaaaagtgaaattaaatttttattaatttttttttttttttttttttttatttttttttttttttttttttcgtagttttagtagttttagtagtagtagtaatagtagtagaatttgttttttttaaaattagatgatttataattgcgtcgattgtttttttaaaaattagtattaatatttatgaatttcggtatttttcgtttgtaaaatatcgtgttaaggtattaggatacgtatatatatacggttttttatagtttttagaaatatgttttcgagagaaatatatatagttataattattatttgaaaaatgttattttttagtgtgttttttttacgttattaatataatttcgtaaggtataagtgttgttagggtatgtgaaatggaaatgaaagttcgttagttgaataatcgtaggagtaaaattaaaagttatttttcggtttgtttgagaatagtttagatcgaaagtaaaataaggagaggaaattgcgaagagtcgcggttggaaatttttttatttttcgttttttttcggtcgcgttttttttttcgtttttttttttcgttttttttttttcgttttttttttttagtgtttgttttaagtttgtgtaatcgggaggtggaggcggagggagggcgcgagcggttcggtcgggaggtgcggaagttcgtcgtagtagtttattggcgggtagcgtcgtttttattatttttcggaaaagttaattttattttcgtttttttaggtcgcggcggcgggagtaataagtagcggttcgtgagttcgcggttcgtatttaggggcgttcgtacgtgcggttagaacgttcgagtcggggttcggggcggggggcgtaggttcgcggcggtaggggaggagagcgggtattcgagtttttatttttagggtggtttgaaggttttaggagggcgttcggcgaaggtacggggttgcgattatttagttagtagggttggtgtgattgttgagagtaaatgaaaattcgttttgtgatatcgattatttttaaggaatgaaaggagtagttagtcgaaacgatagtattatttgcgtttttatttaattggaattttattcgtggttgagggtgttattattggaggggtcgtcgttttttttgatattatttggcgtttcgttttatttaggagttagaacgaaaaggaggtttattttttagtaagttatagtttacgttaagatgagttttggagtttgtgcgatcgaagtttttttatcgtagggcgaggtggataagggtgtgagttattttgattttaagacgttttagtggcggttggttttggagagaggttttatgttggagtatttttagtaaagttcggttggggtttttttaatttattggttggttatttttggtttcggtttttaattaaagtttaaggttttagtttttaacgttgtaaatggaaataaatgagagaagaaagtatagttcgtgtgataagtgtagtaagtaatgtaatttttttgggatttattttttgtggttttttgttttaaaagtatagatttatatttagttagatttgtttttttttcgtatgtaattttattagtttttttttagatttttgtatttaatagaggaagtttttttttgggagattatagttgtttgtatgtaaagagttgcgaaaaaataaaagtaaaataaaaaattttaatatttttttgttatagaagtattgaattatatagattggaaaaatggaagtatttaagaaaacgcgtgtggtaagaaaatggttaaggtgtaggattttgttttgtggttttggttttagaaatagattttatatatatattattttttattttttttattataatatttatttttttttttttttaagagatagggtaggtcgggtgtagnggtttatgtttgtaattttagtattttgggaggttaaggtaggaggattatttgaggtcgggagtttgggattagtttgattaatagggagaaattttatttttattaaaaatataaaattagttaggtttgggggcgtatggtttttaattttagttattntgagagggttggggtaggagaattggtttttttttttatttagtgtagggtgttttaagttatttatttattttgagtttatttttttatttgtaaaatattaattagtttaatttttttagagattgtttaaggatttggtgagaaaatatttttataacgttttttaaattaagttttaaagaaatataaaatattttattagttttttttcgatggtatgaatataaaattttgtttaagaagtgtattatagggttgggtgtggcggtttatgtttgtaattttagcgtttttggaggttaaggtaggtggattatttgaggttaggagttttagattagtttggttaatatggtgaaaatttatttttattaaaaatataaaaattagttaggtatggtggtgggcgtttgtaattttagttattcgggaggttgaggtaagagaattatttgaatttaggaggtagaggttgtagtgagtcgagattatattattgtgatagagttagattttattttaagataaaaagaagaaatgttattatggataatttttatgattttgtgagtattttaagagtatttaattaagttggtatatttttaaatgtattatttttaaatatatataggagaaaaaaatatgtgtgaggtttgaagggatgttgtttagaatgtaaatatattttgtgagatgtggggtggggatcgattgtggaggtagagacgagagagggagattttgaaaaaggaagtcgtaaggataatagattaaggttaaattaggagagaaatgcgtttagattttttgggtaagtataatttttatattaatgtgatagttttaatttagaaagtgtacgttttttaaagtaatttagtgaatggggtttattgtaggaattgttttagggttattaagtgtagtgaatattaaggggagtattatgatagagtttattgagggatttttttttttttttttttgagatagagttttgttttgtcgtttaggttggagtgtagtggtacggttatagtttattgtagttttgattttttagatttaagtaatttttttgttttagttttttaaggagttgggattgtaggtatgtgtaattttgtttagttaattttttattttttttgttttttagagatagggtttttttttgttatttaggttggagtgttacggtataattatgatttattgtagtttcgaatttttgggtttaagtaattttttcgttttagattttggagtagttgggattataagagtgtatttttacgtttagttaattttttatttattttattttttatatatggggtttcgttttgttatttaggttggttttaaatttttggttttaagtagtttttttattttggttttttattgggattataggtacgaattattatgttatatggaatttttgaattggggtttagaagaaaatgtagtaagttttgagagattgaggatgatgtttggttaaagggttggtttgaatatgaaatgtatttttattaatgttcgtgtgagggtttagaggtgttttggttttggagttaggagatgtgggttttaggtagtgttttgatatgttttagttgagtagagttgttttttgggagttagttttttgtttggtaaaattaggataatatgttttatttttcgggttggggagggtggtgcgaggagtagaaataatgcgtggaaagtaatttgtatcgtgttttgtaggagaggaagttgttgtttttgtttgtatgtgttaggttagttattgtagagatgtacgttttattaaaatatcgttatttttattaggttgtagagatattagggttatagtatagttgagatgaggagttgattgattttgttgggaggatttggagatgatttatggtaagagtattataggaagagagagaagtatttgttttttcgagtgttagggtggtagagaggttatcggaagtttttatttggttgaagatttgtagtgagtttggggtttaatttagaggattgagagaaggttagtattatgggaattgtttagtatgggggtttagggttaatagagagaattttgattgtatttaagaagaaaggcgaaattcggagttaggatagttgagttgagtaggaggttagagaagtaggagtagtatgtagaaagtgggttagtagtcgggagaggtttgcgaggtgggatgtgtatacggttgatgttggatatttggagttagggcgtgacgggggtattggttgattgtttagggtttatgttttatttttcgtttttatttattacgtttgtttatatttttttgtgtgggtttttatttagtttggttacgttttagtggtattcgtagttttgtttttttttttatttataaagagtataataaagagggtagtaaggttaggttaggtgagaggttatttattttggttagtaagtatgggtgaggtaggatatgttaggtttttggtaatttagaagtttttttggaagagatggaagacgtaattttatttagtaagaattaatttttttgtttatttattaattttattttttttacgtagttttttaaagtaatttttcgagtatttttaaagtcggaggtttggaagtgatgagaggttaatatgcgttttaatgagatatagttttgggttttattttatttttttgagattttagtttttgtttgttttttttatgtttattttttttttttgattgttagcggtagtcggtagattatatttttatgcggtagtttaatgtatttagttaatgtataaaggaagttagtggaaggttattaataaataatggattaaatagggagagtgtgaaagatgaatattggatgttttttaggattttgtatagttatttatatgtatatatattttgtaaatttttaagaagaaaatatagtatgtggtatgttttaaatttgattgttttatagaaaatgttatgagtttaattgtgtttttttaaaatttatatattgaagttttaatttttagtattttagaatgtgatggtatttgaagataagttttttaaaatgggaattaaggtaaaagggggttaggaaagtgggttttaatttagtttgattggtgtttttataagaagaggaggttaggatatagatatagatattatacgtgtgtatatatagacgaatgattatgtgaatatatagtaagaaagtagttatttgtaagttg

SEQ ID NO: 85 - DNA, 6022 bp, Artificial Sequence
  chemically treated genomic DNA (Homo sapiens)
attttttagtaatttttgatttttcgatcgttttattttttgtcgagtacgtttatttagttttataattgtttgttttttttttttttgttatttatgtatttgttcgtttgagagttttttattttatttcgaggttttttcggttttttggttattgttttttttcgggcggtatttatattatggttagataattttttttttattgtagtttttattttattacgggggaatatgagttaaagttatgtaattcgttgtcgggtaggaattaatagagttagtatatgtttttttcgtatttttttttttattaggtggttaggaatgtttcggattttcgtggttttgttatggatattttatttgaataagaagtaattttttttttagaattttagggggtttcgttattatagtataatttaatttttttagaaagatatatttttttatttagtatgtttagagttttatgtgtgataagtgacggtatgttgttttataaaatttcgttgaaagagtcgttgatgaattttagaataatttaatattaggcgttgttataaatgggtggaattagataaagtcgtttgttttttattttttgttttagtttttagaaaattgtttaaaggtattgtaaattatttgcgtttttattggtttggttaaggagttggtagtgttaattggttttgtgtaaagttacgttattgtttttgtagagagtatgatacgttagagaggtgggaagtgttgttaggattttttttagaatgttggtaagaagagtaggcgaaaagggaagagttgtttataaatagggaaaggagatattatttcgtatttttggttttttattacgttatcgattataattataagttttattttttataagtttgaaagcgggtttttttttgtatgtaggaaaaagtttcgtttattaattttgtttttaaagagattataagttggttttgaacgttttgtgttttgggaatgtttattgtcgaagttttgtaaatttttttattgaaggtatttagggtattttgttaattaaattaggaaaatgtgtatagttttatttgaaaaaatttaggtttatgttttgtattttattattaaagaatttattattttttaaataatatttaattattttaaattgagtgtgtagtgagagtatttataatataattttatttttagagtgttttattttaatttttttttggtataagtagtttagaaggttagattttttttttttagaggattaaatattcgagaagagtggttaagaggtagtattaggttttttttatttttttaaagagaatttagttttgtgaagaagaataaagtgaaggttaatggttagatttatggtttaaaaataaaatgtagttttttttattttgaatttattataattaaaaaggttacgaggtagttattaatgattttaagttgtaatagaaagaaaaaaatatttatttagggttaaacgaggatttagtggttatttgtcgtcggtttttattttataggggcggaggatgaggttagggaagatttttttatttatattgatttgattagagatgaaatttttttttttatgatagtttgtatttagaggttgattttgaaatagttatgttaaatgtagttaatttttgtgtataaggagaaaaaatagttttttagagttgtgtttttgggttagttatttggattttttataatttttttcgttttttttatatttgggttgaatttcgttttttttgtttgttaggtttggtttgggggttaaatgagtgaaagttcgtgagatatttttaagtattgaagtgcgtagtaaatgataatagttttgatttgttgaatatgatgatgtgttaggtattgcgtaaagtattattttattattataataaatattgttgggaggtagggatatttttattttttttgtatatttagaagtaggattttggttaaatggtttttttaaggttttatagttttaaaaatttaagtatttatttaatttttaatgatattattttttggttatgtaatgtgttatggttagtaattagatttgtaaatatatataattaaagaggattagaagagatatatattttatataaattatatgaaaatagtatttttagtatttttttgattttttttggtaattaaaaatgattgttttttatatttttttatggatatagttgtattgtttttagttaattgtagtttttttttttaaagagtgaattagtgggaaaatagtgttatttaagattttaagaatttagtgtgtgtgtttgtgtgtgtaggatgggtttttttgaaatattttatttgtatgtgaatgtataattttaaagattggtttttaaaatattgaattgaggtaaatttagttttttttgtagattttttacgataaatgtgaaattgaaaatggaaatgttttatttagatggtgtgtcgattataattttaatatacggataatttattaaataagtaattttttcgtggaatattacggttagtttttgttttgggtatatatttaatgaattggttttttattagtttttgtttgttaataagttgtgttatttattgataaatatttagttttttattaaggaatatcgatttttttaagttttagtgtgtggagggggtgggagtttggtggggaagttttttaatttgagaatttttgtcgttttttgttttaatcgtgattaagatataaaagtttttggttattattgttagttgttatttgtttattgtttttttgacgggtaatgaggttattcggagttttagtgattaaaatgttttattatttgtatttatattattattaagaaaaataatttttagtggattaatatggtaaatgagtaaattagaagatggcgttgaagattagtaattatatttaaaaataaggtagtggtgtgaaggtttagagttttatataacgattgttgttttgaattaaaagtagaggatgtggatgagtgaggggagggtatgttgaaaatgattaaattcggtgtagaggatacgtatacgaaagtgtaaaaagtttttatttgttattttttgtttttagtaaatttttttttggtatgtttgtgaacgtttgagggaaaggtaatattgattaaaatataatgtaataagaaggtaacgatttttgttttgtttattgatgtgttttaagtgtttaggacggtttttgataagtagtaggtgtttaaaatatatttgttaagtgaataaatttgtgaaaggaaaggaagaaaaataggttgtgattagaattttttgtgaataaaattttgttgtttattatatagattttggtaatggaaaatttatttgggtgaaataaaaaatggtattttgttaatttttgagaacgtttgttggttttaggaaaagtatatttatttatattttattatttgttttgttttagtttaaatatagatttttttttggttaggagatattgatttaatatataagattaaaataaaaattgagaaataagtgaaattaaaagttttttaaaagttgtaggttgatttacggtggtggtggtttaaaattatatagaaattagagatttgatggtttatttgaaaatgcgaagtaaatgtatatatttagtattttagacgatcgaaagtttaacgggtgaaagtttagggggttaattttgcgattaaggatattttggaaaagtatgtaaaatttttggtttatttaagtattatttttattttgggtttttatttatttattttgagatggagttttgttttgtcgtttatttcggtttattgtaattttagtttttcgggtttaagcgattttcgtggttcgtttttttaagtagttggggttacgttcggttaatttttgtatttttagtagagatggggttttatcgtgttggttaggttggtttcgaatttttgattttaggcgatttatcgtttcggttttttaaagtgttgggattataggtttgagttatagcgtttggtttattttgggtttttatattttattggtaaattgtttttttttaggttgaggttaaaacgatattattttaaggtgaattgaagtttggaagtgattaagtatttggatttttagggagttttttttcgtttttattttttttatgttaagataattaaaatttcggggtcggggtattgtttgagttattttaatttattagtttaatagatgtaaaaggatgtaagtatgttagatacgtagagatagtatttgaattaagtttaatagtttaagggagttgggttattttttattttttttttagtgagtgcgatgttttttaaatatcgcggagaggtagggttttcggtgatggttttgtcgagggtgttttcgtaatttttatttttagttttttttggattattttttcgtttttcgttatacgttttgtaaagcgaagtttttttcgtattagattttcgttattatacgttttttatttttcgttttggttatatcgttgtagtttagtgattgattggttttttgaggttttggcgtaaaggcgagattcgtatttcgtatttcgtttttcgcgggaaacggttttagtgatagttttcgaagcggcgcgcgttcggttggaggtgcgtttttcgggcgcggcgcgcggagggtcgttaagggcgcgggaattttatttcggtcgcggtagtttttagtttttacgtcggttttgaggttcgttcgttcggtcggtttcggttttcggtttgtaaagtttttttttttagtttaattttcggtttttataggtttcggcgtttcgtttcgttttaggtttcgttttagagagttttataaagttttttttttttatttcgtatttttagttttatcgttcgattttgggatttatcgttgtttttagtttcgagtttagggcgaggtaagggttggagtcgggtaggaggaggggtgtgaggttgatattagagaggattcggagcgcgaattagaggttcgatttttagggtagcgtagggtatttcggtttcggagcgggaagggagcgcgtttcgttttggagtttcgatttttattttatttgcgttgagtcggaggcgcgggtttgggttttaaggttcgtttttttggttttgttcgagttttttcgtttgtttttcgcgtttttgcgacggggtcgttataagttggacgggatgagttaatcggattgtcggggtttttcggggttcggcggacgttttgcgcgcggaatttttcgtattggggttgtagttttcgcgtttgcgttatttgtcgtttgtagagtttatttagtgcgcgttagttgggtagggataggggttttattcggggcgaagggtttggatgcgagtagagaaagcggagggtggaggaattcggggttgcgtttttggaacgttcggtcgtaggcgaggtttttcgcgcgtggaggtcgttaggggagtggaaattgatagagtcgcgggaaggggcgagaagcgggttgggagtgagcgaaggtaagcgagagttgcgagtgagtgcggaaggagggttaggaggggtggcggttgggtggggagagagggtgtaagacgagcggcgcgtgtcgggagtttttgggttgcgggtgcgttataggagagtaggcgggtaggagttttcgcgggggtcgagttcggaaggcggacggttgtgttcgtttaggggatgcgttcgggtcggtcgcgaaggtgttttttttcgggggttcggacgattttgatacggtacgcgcgcgtttcgtagttttaaagatttcggggtttcgtggttattggcgtaggggatcggggcggggtgttcggagtgcggtgtttcgtggttgaagggtagttttttttttcgtagt

SEQ ID NO: 86 - DNA, 6022 bp, Artificial Sequence
  chemically treated genomic DNA (Homo sapiens)
attgcggggagaagagttgttttttagttacgaggtatcgtatttcgggtatttcgtttcgattttttgcgttagtgattacgaggtttcggagtttttgaggttgcgaagcgcgcgcgtgtcgtgttagggtcgttcgggttttcggaagaaggtattttcgcggtcggttcgggcgtattttttgggcgggtatagtcgttcgtttttcgagttcggttttcgcgaaggtttttattcgtttgtttttttgtaacgtattcgtagtttaaaggttttcgatacgcgtcgttcgttttgtattttttttttttatttagtcgttattttttttggtttttttttcgtatttattcgtagttttcgtttgttttcgtttatttttaattcgtttttcgttttttttcgcgattttgttagtttttatttttttggcggtttttacgcgcggaggatttcgtttgcggtcgggcgttttaggggcgtagtttcgggtttttttatttttcgttttttttgttcgtatttagatttttcgtttcgaataggatttttatttttgtttagttagcgcgtattaagtgggttttgtaaacgataagtggcgtagacgcgggggttgtagttttagtacgggggatttcgcgcgtagagcgttcgtcggatttcggagggtttcgatagttcggttagtttatttcgtttagtttgtggcgatttcgtcgtaggagcgcggagggtaggcggggaggttcgggtagagttaaggaggcgggttttggagtttaaattcgcgttttcggtttagcgtagatggggtgggagtcggagttttaggacggggcgcgtttttttttcgtttcgaagtcggggtattttgcgttgttttggaggtcgaatttttggttcgcgtttcgggttttttttggtattagttttatatttttttttttgttcgattttagtttttatttcgttttggattcggagttgagggtagcggtgggttttaagatcgagcggtgaaattgagagtgcgaggtgggaaagaggaattttatagaattttttggggcggggtttggggcggggcggggcgtcgaggtttgtgggggtcgggggttggattggggagagggattttgtaagtcgagagtcggggtcggtcgggcgggcgagttttagggtcggcgtgaaggttgggggttgtcgcggtcggggtggggttttcgcgtttttggcgatttttcgcgcgtcgcgttcggagagcgtatttttagtcgggcgcgcgtcgtttcggggattgttattggggtcgtttttcgcgaagggcgaggtgcgaaatgcgaatttcgtttttgcgttaggattttaggaggttagttaattattaaattgtagcgatgtggttagggcgggaaatggggggcgtgtagtagcgggaatttggtgcgaaggggatttcgttttgtagagcgtgtaacggaagacggaggaatggtttaaagagaattggaggtggaggttgcgggagtattttcggtaaggttattatcgggaattttgttttttcgcggtgtttagagaatatcgtatttattaaaaagaaaataggaaatggtttagtttttttgagttattaagtttgatttaaatattgtttttgcgtgtttgatatgtttatatttttttgtatttattaggttggtgaattgaagtgatttagataatgtttcggtttcgaagttttaattattttagtatgaaagagatgggggcggggagaggttttttaaggatttaagtgtttaattatttttagattttagtttattttaaaatgatgtcgttttaattttaatttggaggaaagtagtttattagtggggtataaaagtttaaaataggttaggcgttgtggtttaagtttgtaattttagtattttgggaggtcgaggcggtggatcgtttgaggttaggagttcgagattagtttggttaatacggtgaaattttatttttattaaaaatataaaaattagtcgggcgtggttttagttatttgagaggacgagttacgagaatcgtttgaattcgggaggttgaagttgtagtgagtcgagatgggcgatagagtaagattttattttaaaataaataaataaaagtttaaaataggaataatatttaagtggattagggattttatatatttttttaagatgtttttaatcgtaaaattaattttttgagtttttattcgttgagttttcgatcgtttgagatgttgagtatgtgtatttatttcgtatttttaggtaaattattagatttttggtttttatatgattttagattattattatcgtaggttaatttgtaatttttgaaaagtttttgattttatttattttttagtttttgttttaattttatatattgggttaatgttttttaattaaagaagaatttatgtttaggttagagtaaaataggtagtgaggtatggataggtatgttttttttaaaattaatagacgtttttagaaattaataggatgttattttttattttatttaagtaagttttttattattaaagtttatgtaataaataatagggttttgtttataaaaagttttggttataatttgtttttttttttttttttttatagatttatttatttgataaatgtattttgagtatttgttatttgttaggaatcgttttaggtatttggaatatattagtgaataaagtaaagatcgttgtttttttgttgtattatattttaattagtgttattttttttttaaacgtttataaatatattagagaggagtttgttgaggataaaaaatggtaaatgagagttttttgtattttcgtatacgtgttttttgtatcgggtttagttatttttaatatattttttttttatttatttatattttttgtttttagtttagaataatagtcgttgtgtgaaattttgagtttttatattattattttgtttttaaatgtaattgttaatttttaacgttattttttggtttatttatttgttatattgatttattagaagttattttttttaatgatgatgtgaatataagtaataaaatattttaattattaaaatttcggatggttttattattcgttagggaggtagtgaataggtagtagttggtagtggtgattaaggatttttatattttagttacgattgaaataaaaaacggtaaaggtttttaaattgaaaagtttttttattaaatttttattttttttatatattgagatttgagaaaatcggtattttttagtaaaaggttggatatttattagtaaatgatataatttgttgataagtagaaattaataggaaattagtttattgaatgtgtatttaaaataaaggttgatcgtgatattttacgaggaagttatttatttagtgaattattcgtatgttgaggttgtagtcggtatattatttgaatggagtatttttatttttaattttatatttatcgtaaagagtttgtaagaaaagttgaatttattttaatttagtattttaaaagttaatttttaaaattatatatttatatgtaagtaaaatattttagaaaaatttattttatatatataaatatatatattagatttttaaaattttggataatattatttttttattaatttattttttaaaggggggggttataattggttaaaaataatgtaattgtatttataaagaaatataaagggtaattatttttaattattagaaaaaattaggaaaatattgaaagtgttatttttatgtaatttatatagaatatatgttttttttaattttttttggttatatgtgtttgtaaatttaattattggttatgatatattgtatggttaaaaggtagtattattggggattaaataagtgtttgagtttttaaggttgtgaggttttgggagagttatttaattaaagttttatttttgggtgtataaggagggtgggggtgtttttgttttttagtagtgtttgttgtgatgatgaaatgatgttttgcgtaatgtttggtatattattatgtttaataaattagggttattattatttattacgtattttaatatttaggggtattttacggatttttatttatttggtttttaaattaaatttggtaggtaaggaaggcgggatttagtttaagtgtagggagaacgaaagagattgtgagaggtttagatggttggtttaaggatatagttttgaggaattattttttttttttgtatatagggattggttgtatttggtatgattattttagaattagtttttgagtgtaggttgttataggagggggagttttatttttggttaggttagtgtgggtaagaaagttttttttggttttatttttcgtttttgtgaagtggaggtcggcggtaagtgattattgaattttcgtttaattttaagtaggtgtttttttttttttgttgtaatttaggattattaatggttgtttcgtggtttttttggttatggtaaatttagagtaaggaaagttgtattttatttttaagttatggatttaattattgatttttattttatttttttttataaggttaaattttttttgaggaaatgagagaaatttggtgttgttttttagttatttttttcgaatgtttaattttttggaaaaaaaaaatttaattttttaagttatttatattagagaggagttgggatggaatattttggaaatgagattatattataaatgtttttattgtatatttagtttaaaataattgaatgttatttgaaaagtgataaattttttggtaatagaatatagagtataaatttggatttttttaagtagagttgtatatatttttttaatttaattagtagaatgttttgagtgtttttaatgagaaaatttgtagagtttcgatagtaagtatttttagggtatagggcgtttaggattagtttgtgatttttttgagggtagagttagtaagcggggtttttttttatatgtagagaagaattcgtttttaggtttgtagaaaatgagatttgtgattgtaatcgatgacgtaatgagaagttaaggatacgaggtgatgttttttttttttgtttataaatagttttttttttttcgtttgttttttttgttagtattttaagaagagttttggtaatattttttatttttttgacgtgttatgttttttatagaaatagtgacgtggttttatatagggttagttgatattgttaattttttaattaagttaatgaaaacgtaaatggtttgtaatatttttgggtaattttttgaaaattgaagtaagaggtgaaaggtaaacggttttgtttaattttatttatttgtaatagcgtttaatgttgggttattttaaagtttattaacggtttttttagcgaaattttgtgaaatagtatatcgttatttgttatatataagattttaggtatgttggatagaggagtgtatttttttagaaaggttaggttatgttgtggtaacgagattttttgagattttggggggggggttattttttgtttaaatgagatatttatggtaaagttacggggattcggaatatttttggttatttgatggagagaagggtacgggagaagtatgtgttggttttgttagtttttgttcggtagcgagttatatggttttggtttatattttttcgtaataaggtaagaattatagtaaaggaggaattatttggttatagtgtgggtatcgttcgagagagaataatggttaggaggtcggggaggtttcggggtgaggtagagagtttttagacgggtaggtgtatgggtggtagaggagggaaggataagtagttatggggttgagtagacgtgttcggtagggggtggggcggtcggggagttaggggttgttggagggt

SEQ ID NO: 87 - DNA, 9091 bp, Artificial Sequence
  chemically treated genomic DNA (Homo sapiens)
ttggttttaagttgtagaggtttgagatggatttggtttagaaatgttttagagtttgaggttggtggttttttttattttatattaaagacgggtggatttcgtgggtttggttgggatatttgtagatgttgagttttaataaggtttattttgggataaaagtgtatatcggaggtttttggttggtgtttgtggggttggattggtatttgtttttataaagtagtggttttagaaggttggggtttttagttagattttgttttttttttttttttttttgtttaggtgttttatgttttatagcgagttttcgagatatgtaggaaggatggatgttttatttttttcgtaatagagtttaggagtagggaaggaagtggtttgagtatagtgttgagttaagtaagttttagaagtattgaattagattacgtgtagttagtaggggaggagagaaattttgggtcggtgttttggaggttcgcgggggataggggtatagaggcgtagatttaggatgttgagttgggagaggaatttcggaggaaagtgagagggttttagtacgtttatttaaaggggatggtgagaaatttaggaaagagtgaaattttaagatttgagggtttaagtgagagaggtaggtagagattggagttttgggggagttttcgtgggttttagggtttgtttgagttgtggatttaaggtttggaggatagggtggggttagaatagattttatcgataagggtaggagttaggttgtaggtattagagaggataggtgatttgtcggggtttggagtaagggttcgggtagttttttttataggttatgtgaagatagagttatggattgggaaaggtggagatttcgagtgtagaggtgtttatgtaatagtgttggttgaatgggggatttttaggttatattttaaaaagttttgagtcggtgttagtaagaaatggggaggaaggtttagttgtggcgttttgggtattaattttaaaaaaaaagatattatttttatgtgttagaaattttaaagtaagtgaatattttaagtacgagaattagaggtgtttttttgttttttttttttttttttgagacggagtatcgttttgttatttaggttggagtgtaatggtgtaatttcggtttattataattttcgttttttgggtttaagtaatttttttgttttagtttttcgagtagttgggattataagtatgaattattacgtttggttaatttttgtatttttttttttttagtagagacggggtttttttatgttggttaggttggtttcgattttttgattttaggttatttatttgttttagttttttaaagtgttgggattataggcgtgagttattttattcggttaagaggtgttaaaatttaaattagattatgttatgttttagatttgaattttttagtgattgtttttagtaaagttatagtttgtgaggtgttttttaaggttttattcgattttattatttgaggatttatcgtttattttattttgtagaatggaagttttaggagggtaggggtttttagataaagtagaaattgtttattattttattttggtaggtataatatgttcgataagtattgttgaatgtagatttatagttaattcgtgatattggtgttattatttttttttatagatgggaaatggggtttttgggggagtgaatggtttgtttaggttacgtaattttagattgtagagtgaggatttgatttagatttgttgattttagagtttgatgtttagttaataagtttttagaaattcggggtttttgagaaataggatagttagttggggattttgagaagttaggtcgagggggttgggtttttgaggtagaggtttgagaggtaaggtagttgttattaattaggttgtattgaagggggttgatttatgagtagggtgtattgtttaggttgttagtggttttatggattttatttagttttttttggtgatacggtttttttttttttttttgttttttattttagttattttattttatattcgtttatatagcgtagtttttattcgagttaggggagggtgttttttattatatttttagtttgtgatattttagttaggggaaatgggggaaggggttattttattgtggggagtggggggttcggatagatttttttgtttttatcgttttttggtttattaaggggaaatgggagtgtttatataagggtcgggtgtggttttattttttttttatttgtttttttatttttaggatggtattgggaggttaagggattttagattttggaaatattggagtgttgttttttgtttttttttttttttgggttatgtttttggttttagatgatttttggtttaggtttttttagttgagggaagttaggatttgagttaagttgagtttttgtatagtttttatttcgggagttttatattaatgttgtcggtttggtaatattattttttttttagagacgaggaaatgagatttgaggttttatttaaggttatttggttggaatatagtaaagttaggtgtaagttttttttttgtacgtagttcgtgttgttttttgaggtttagaggttttaaggaaggggttttatttgagtaagatggatagtgggaagggggtagagggtagaattttagggttttacggttttttagaatgggtgaggagtatttgataataaaagaaggttttttttagttattgttttagatacgattagtatagaatatttttttattaagtataattgatttttagtgaaaaaggtttttattttgtggggagttatttttgaaatagtaattttattttattattattattttgagataagattttatttttacgtttaggttggagtgcggtggtgtgttttttgggtttaagtaatttttttattttagttttttaagtaggtggaattataggtgtgtgttattacgttaggttaatttttgtattttttgtagagataaggttttgttatattgtttaggttggtttcgaatttttggatttaagtgatttgtttgttttagttttttaaagtgttgggattataaatgtgagttatcgtgtttggtttagtaattttatttttaaagaaagaaatataaaacgatttatttatttatattttttttatttatattttaaattttaaaaatatgaaataatgaaatatttagtagatataaataataaaatatttatatataatgatatttcgattttatattagggttttaaaggttaggaaagagggagagatatagaagagaaaaaaaaaaaacgttaatatatgagtgtttttttttaatttgttaaaggtaaagtttaatttaggagaagggaggggagggaaggttaaagttttgatttattaataaatattattttatttgttaaaaatataaggttttgtttggcgtagtggttttcgtttgtaattttagtattttgggaggttaaggcgggtggatcgtttgaggttaggagttcgagattagtttggttaatatggtgaaatttcgtttttatttgggaggttgaggtaggagaatcgtttgaattggggaggtagaggttgtagtgagttgagatcgtattgttgtattttagttcgggtgatagagtaagattttatattaaaaaataaaataaaataaaatgaataatgaaaagataggagggaggtttttgagtaagttgattcgagtggaaattagatattaaaattgaaattcgttgaattttttaaaaagttagatgtttatagaattgaagtttgagatatttatattagtatatttgttgtttgttgattaattttttttttttgttttttttgttttttttttttgttatataagtttttaattttagttaaggggagggatggattggaggtttgtttttttttttaatagtttattggttgatgttatcggaataaagttttttttggtaatattcgttgttttagtgataggttttttgtgcggtgagtagttagatttggattaaatttttggtaatttataataaaattataagtaaaattaattaggaagttatttgtattttggaattttatttgggaggggaagttaaggtagattttttagagaaggcgatgttgaaaattttagaaatagaaattttgaagagtaagagttattaagcgaagaatattttatgagaaggaataggaggtgtgtgaaggtggaggttttggggtgaggttttttatggaatcgaaaacggtttagaattataggtcgacggttaaggtagtagtgagaggaggtgggataggcgattacgtcgttgtttttgggatgattggaaggcgatttaggggagttggggcgagataggtgtagggtttgaggatgagaaaggtatagagtgattagaggattttcgtttgtaagtatatttggaaggggtgtttggattttgggggtagcgattgtgttttagggcgagagttattttcgttaggggtgtaggtaggcgagaggagggtttggagttgtgggtcggttatattgcgtttttatttgtgtgtagtttcggaggattagagtggggaagtattttatttttttttagggtttaattgagtattgtagcgggaggtacggggttgttaaatgatagttttgttattttagattgttaaaagagttagtggttagtttagggtatcgcgtcgtttggtatttttttggaggttttgggtttggttcgaggtttagttcggatttgtagttgttaggttagtgcggggttcggagtggattcgcggggcggggcggggtattgttcgcgttcggagtttagtagtagttgtttaggggcgggggcggtaagacgcggaagtgttcggtaggttggcggatcggcgggaggcgtagtttgggtagagtttagtttggtttcgtcgttcggtcggtgttttttggcgtagttacgtaggcgtatcgtagataggtgggtttcggtcgtcgcgtttttttttttgcgttcgcgttcggcgcgtttcgagggtggcgagagcggtgttcgttattgtttttaagtttaggtttagattgggtttcgcgttttttaggtattgcgggcggcgggatgaagattggagtagggcggggttcgcgtttagttgcgtttggaaagcgagttcgggggggtgtttatagtagggtgcgttcggtcggtttgggatttttaaagcgttttttacgtttcgatcggtttggggtgttggcgttcggggagtttagtgatttaggcggcggagtgggtagcgttgcggggggcgtcggttttgttgttttttttttttttcgttatcgtttagaatgggggttttcgggagtttcgttggaggttggtttggattatagaggagcgaggttcgatttttattttcgatgtattcgtttttgtttttatcgggttatttttattttttcggaaaagaggttgaggttaaagcgtttatttttcgggatttttaggttaatggtaggaattgtgtaagagtttgggggaagatggtgttaggtagaggttgcgtttttgggttcgcggtcgggaatggtagattttcgtttttcgagtagcggaaaaggatggggcgtaatagtttttgggttggtttttttaggttttgttttagaatttaagaaggtaataatgaagaggttaaacgtggaggaaaagtgaggttagtatggtcgggatgcgtggggagatggttgttttcggatttcgggaggggcgggagcgggtatttgggagtagaggttggagtgggggatttttttagtttcgcggttacgttgaatatagtagggcgaggatcggggtgttgtttttttagtagtaggaggagaggtttagaggtcgattttggaggtgggggtggtttcgcgggttggtttagggggtgtgttttagcggagtacgcgggaggggtgggggcggaggattgggttgggtttgggtttttcgagggtttagaatggggataagtgattagaattagagagggttcggttgtatcgatgtaggaaattgtagttttttaggaggttttttggtaagattttttttttttgtttttatttttagtagttatggggtttggggtgttggggttgaggggttttaagagttaagggaagtattgggaaattattttttttttatttaaaggttttattttggggttttttttttgtattttggtttttttttattttgattttgggaggaagttgaaagaagtttttttttgggtattttttgttttagagttttagtttgtttggattaggtgggtagtagggtttagggtgtgggtagttgattcggaggggtgggatttgggggttagggtttgtatagggaattttttgttttttttttgagttgggtgtgggtttgtaaggagatatgtgatttagattaattttgggagtagtagggcgtttgttgtttggttatttttattaggattgttgtggtatttttttttttagtgggtttttggtgtttatgaattgtagtttttgggtggtggtgggggtattgttttttgggattttagtatggttttggggtgagttgtgggtttattttattttagtaggttttttagggttgtttattggatgtttcgttgttttatataattgtagggatttttttaggttgttggatttttttatttttcggggtttaggtttattgatttaggtttagggttttatatattttatttagagatttcggagtttggtaggtagatttgttttgatatcgaatttttaaagttatgggttttgattggggtggtttgaattagatttagtttttttttgggtagaagggagtttttaggaggatggatgttgttcgggttagagttcgtgtggatttagttgtaggtaaaagttttgaggttgagttttttttgtggtatggtggatagattttcgtttattatagtcgggtttgttacgggagttttttttttatatttttttttaagttgtttgtatggacgcggttttttgatattgaggtcggagttattattttaaaattttgttttgtattaaatagtcgtgttgggtagggttagattgttggattgatagtagggggtaggtagtcggattttttgagttttttaacggtattagcgtttgtacggttttagtttagggggttattagggaagtttttttcgattttgtgtagatagagttttttttgtttatttttgttcggttagaattgtgtgtcgttggtgattggtatttttttattttagggttaaggttttttaggggtttatagatataattatgggtgggtgtatatttatgttataaattatattaaatgtataaaaattgtttgtaagtttggggtgcggggaatagttttgggtgggaggttggaaatttggtttgggggatttattcggtttttttttttagtttatagtgagtttggtttttgagttgtttcggtttagttattttcgttttttttggggtcgggtggaggttggggtagaaagcggaattgagttcgcgtgttttgaggttagggtagggttggagcgttttgaatattttttcgttttagtttttgggttaggtaagggtcggttttattttttttgggttggtggtagtagagttgggttttgagggaggtttgtaatgtgagatagtagtagtttagaggcggtattaggtaggtgtaattttaaaaggtattgggtagggaattttaggggaaattgaggttttatgttgtaaggttaaagtaggtttagatatagggagtttagttcgaacgtttgttttttatttgttgatcgatatatttatttttgatgggttgtgttgtgtaatgatttagttttttttgttttttatttaggggttttaagtgaagggttaagggtatgggtaaggggaggagagggatagaaggggatttaggattgtggagagttttcggttttgggttggagagggagttgggtaggtgaaggggaggaggtagggtttttttggtttgattttagggaggtagtgaagttgtggtttgggaggcggggttcgtgtttttgggtaggtagtagttagagttgtggtttttgttttttgtagtttttttaataggtttcggtaggcgttagggtttttttaagtgttattcgaatgcgtgtttagtgggaggagaagggggaggattaagaatttagatgaatggttttagagaggtaatatttgtttggtgtttgttgttattggaggtgggttgagttggttgatgggatttttttaaagatattgagaaattgtttttttttgagggtaggtgtttttgggagttttagatgagatttttgttgagggtattttcggagggaatttttaggggatggagggtgagaaaatttgggtagggaagaatcgaattaggggtgtagattgagtaggaggttgttttcgggttgattttatagagcgttcgttgttttaggtagttagtttgagataagatagtcgggtttttggtgttaggtagttattggttgtgggttgttttttaagagtaaggggtgggtttaatttgtggtgtgagtagtggaaggcggttttttggttaacgggttgtttgttgttgttagtagttggagaatggatgtttttgttcggtaaagggtatttggggtcgcgttcgtagtatttattaattcgtaattttttttttttttttttaaatataaaattttatgatattagataagaaagttgatgtttggaaaagagaattggttttaaatatttagatggattggagagattattttttgtggtttatagtttgatttttgagtattttgtttttatttatttgtagatttgttgaggtttttttttggtttttttttgtaga

SEQ ID NO: 88 - DNA, 9091 bp, Artificial Sequence
  chemically treated genomic DNA (Homo sapiens)
tttgtaggagaaagttagaggggagttttagtaggtttgtaggtggatggggatagggtatttagaggttaagttatggattataaaggatggtttttttagtttatttaggtatttaaggttaatttttttttttaagtattagtttttttgtttagtgttatggaattttgtgtttggaggaagggaaggagagttacgagttagtgaatgttgcgggcgcggttttaggtgttttttatcgggtagaggtatttattttttaattgttaatagtagtaagtagttcgttggttagagaatcgttttttattatttatattataggttaggtttattttttgtttttggggggtagtttatagttagtgattgtttgatattaaaagttcggttgttttgttttaagttggttatttgggatagcgagcgttttgtgggattagttcgaagatagttttttgtttagtttatatttttagttcgatttttttttgtttaagtttttttattttttattttttgagagtttttttcggagatgtttttaataagaattttatttggagtttttaaggatatttgtttttagaggaaagtagttttttaatatttttagagaaattttattaattaatttaatttatttttaatgatagtaggtattaaatagatgttatttttttagggttatttatttaggtttttggtttttttttttttttttttattggatacgtattcgggtagtatttaggaaggttttaacgtttgtcggagtttgttaggaaggttataggaaatagaagttatagttttaattgttatttatttaggggtacgagtttcgttttttaggttatagttttattgtttttttggagttaggttagagggattttgtttttttttttttatttgtttaattttttttttagtttagaatcggaaattttttatagttttgagtttttttttgttttttttttttttttatttatgtttttggttttttatttgagatttttgggtggaagatagaaaggattgggttattatatagtatagtttattagaagtgaatgtgtcggttagtaagtaaggagtaaacgttcgagttgaattttttgtgtttgggtttgttttggttttgtagtatggagttttagttttttttgaaattttttgtttagtattttttggggttgtatttgtttagtgtcgtttttgagttgttattgttttatattgtaggttttttttagagtttagttttgttgttattaatttaggagaggtaaggtcggtttttgtttggtttaggggttgggacggggaggtgtttagaacgttttagttttgttttggttttagaatacgcgggtttagtttcgttttttgttttagtttttattcggttttaggggaaacgaaagtggttagatcgggataatttagaaattagatttattgtgggttgagggagggagtcgagtgggttttttagattaaatttttaattttttatttagagttgtttttcgtattttaaatttgtagatagtttttgtgtatttagtgtggtttataatatgggtgtgtatttatttatagttgtatttgtagatttttgagaggttttggttttagaatagaggggtgttagttattagcggtatataattttggtcgagtaagggtggatagaggaagttttgtttgtatagaatcggggagagtttttttaatgattttttgggttgaggtcgtgtaggcgttggtgtcgttggggagtttagagggttcggttgtttgttttttattgttagtttagtagtttggttttgtttaatacggttgtttaatatagagtaaggttttgaaatgataatttcgattttagtgttagagggtcgcgtttatataggtagtttagggaggggtgtggaggaggagttttcgtgataagttcggttgtgatgagcgagagtttgtttattatgttatagaagggatttagttttaaggtttttgtttgtagttaggtttatacgagttttaattcgaatagtatttatttttttagaagtttttttttgtttagaaaagggttaggtttaatttagattattttaattaaggtttatgattttggaagttcggtgttagaataggtttgtttgttaggtttcggagtttttgggtgaaatgtatggagttttagatttaagttaatggatttgagtttcggaaggtggggaaatttaatagtttgaggaagtttttataattgtgtgaggtagcgaagtatttagtgggtagttttagaggatttgttgaggtggggtaagtttatagtttattttagggttatgttggagttttaggagatagtgtttttattattatttaggagttgtaatttatgggtattagggatttattaggggaggaagtgttatagtagttttagtaagagtggttagatagtaggcgttttgttgtttttagggttggtttgggttatatgtttttttgtaaatttatatttagtttagggagaggataaggggttttttgtataggttttgatttttaaattttattttttcgggttagttgtttatattttgggttttgttgtttatttggtttagataggttgaggttttggggtaaaaggtgtttagaaagaagttttttttagtttttttttagggttagggtaggggaagattagggtataggggaaaaattttaaagtagggtttttagataaaaaggggatgattttttagtgttttttttgatttttggaattttttagttttagtattttaggttttataattattgggggtgggggtaggaaggggaggttttgttagagggttttttgaggggttatagttttttatatcgatatagtcgagttttttttggttttggttatttatttttattttgggttttcgaggagtttaggtttagtttagtttttcgtttttatttttttcgcgtgtttcgttggggtatattttttgggttagttcgcggagttatttttatttttagagtcggtttttggatttttttttttgttgttggaggagtagtatttcggttttcgttttgttgtgtttagcgtggtcgcgaggttgggaaagttttttattttagtttttgtttttaggtattcgttttcgtttttttcggggttcggagataattatttttttacgtatttcggttatgttagttttattttttttttacgtttagtttttttattgttgtttttttaagttttgggataggatttgaggaaattagtttaggaattattgcgttttattttttttcgttgttcgggggacgagagtttgttattttcggtcgcgagtttagggacgtagtttttatttgatattatttttttttaaatttttgtatagtttttgttattggtttgaagatttcgggggatgaacgttttaattttaatttttttttcgaaagggtgagggtggttcggtaagagtaagggcgagtgtatcgaaagtaaggatcgggtttcgtttttttgtggtttaagttagtttttagcggggttttcgggaatttttattttgggcgatggcgagggggagggagagtagtagagtcggcgtttttcgtagcgttgtttatttcgtcgtttgggttattgggtttttcgggcgttagtattttaaatcgatcggggcgtgggaggcgttttggaagttttaggtcggtcgggcgtattttgttgtaggtattttttcgagttcgttttttaggcgtagttggacgcggatttcgttttattttagtttttatttcgtcgttcgtagtgtttggggggcgcggggtttagtttaggtttagatttgggggtagtagcgggtatcgttttcgttattttcggggcgcgtcgggcgcggacgtagagaggagagcgcggcggtcgggatttatttgtttgcggtgcgtttgcgtggttgcgttagggagtatcggtcgggcggcgggattaagttgagttttgtttaggttgcgtttttcgtcggttcgttaatttgtcgggtattttcgcgttttgtcgttttcgtttttgggtagttgttgttgagtttcgggcgcgggtagtgtttcgtttcgtttcgcgaatttatttcgggtttcgtattgatttggtaattgtagattcgggttgagtttcgggttaggtttagggtttttagggagatgttagacggcgcggtgttttagattggttattggtttttttggtaatttggaatggtaaaattgttatttgataatttcgtatttttcgttgtagtgtttagttgggttttgggagagggtggggtgtttttttattttggtttttcggggttgtatataaatgagggcgtagtgtggtcgatttatagttttaggtttttttttcgtttgtttatatttttggcgagggtggttttcgttttagaatatagtcgttgtttttaggatttagatattttttttagatgtgtttgtaggcgggaattttttagttattttgtgttttttttatttttaaattttgtatttgtttcgttttagtttttttaagtcgttttttagttattttaggggtagcggcgtggtcgtttgttttatttttttttattattattttgatcgtcgatttgtggttttgaatcgttttcgattttataaagaattttattttagaatttttatttttatatattttttgtttttttttatggaatgtttttcgtttggtaatttttgttttttaaaatttttgtttttgaaatttttagtatcgttttttttggaaagtttgttttgatttttttttttaggtggggttttagggtgtaaatagttttttggttgattttgtttatgattttgttatggattgttaggggtttggtttaggtttggttgtttatcgtatagaaagtttattattgagatagcgagtattgttagggaagattttatttcggtgatattagttagtgagttgttgagaggggagataaatttttaatttatttttttttttgattaaagttaggggtttatatagtagggaaggaaaataggagggataaggaagaggaattggttaataggtagtaggtgtattgatgtaagtgttttaagttttagttttatgagtatttggttttttggaaaatttagcgggttttaattttgatgtttgatttttattcgaattagtttatttaggaattttttttttgtttttttattgtttattttattttattttattttttgatatggagttttgttttgttattcgggttggagtgtagtagtgcgattttagtttattgtaatttttgtttttttagtttaagcgatttttttgttttagttttttaagtagagacggggttttattatgttggttaggttggtttcgagtttttgattttaggcgatttattcgttttggttttttaaagtgttgggattataggcgggagttattgcgttaagtagagttttgtatttttaataaataaagtagtatttgttgatgaattagaattttgatttttttttttttttttttttttgggttgaattttatttttaataagttaaaaaaagatatttatgtgttaacgtttttttttttttttttttgtattttttttttttttttgatttttgaagttttaatatgaagtcgaaatattattatatataagtattttattatttgtatttgttgagtattttattattttatatttttaaaatttaaagtatggatggggaaaatgtgaatgggtagatcgttttatatttttttttttaaaaatgaaattgttaggttaggtacggtggtttatatttgtaattttaatattttgagaggttaaggtaggtagattatttgagtttaagagttcgagattagtttgggtaatatggtaaaattttgtttttataaaaaatataaaaattagtttggcgtggtgatatatatttatagttttatttatttgggaggttgaggtgggagaattgtttgaatttaggaggtatattatcgtattttagtttgggcgtagaagtgagattttattttaaaataataataataaaatgaaattgttattttaaaagtggttttttataaaatgggaattttttttattggaggttagttatgtttaatagaaaaatattttatgttggtcgtatttggagtaatagttaagaagagtttttttttgttattaaatattttttatttattttgagggatcgtgagattttagaattttgttttttgttttttttttattgtttattttgtttaggtgaggttttttttttagagtttttgaattttaagaagtagtacgggttgcgtgtagagaaggggtttgtatttggttttgttgtattttagttaagtggttttaagtaggattttaaattttattttttcgtttttaaaagggggatgatgttattaagtcggtagtattgatatggggttttcgggatagaggttatgtaggggtttagtttggtttagattttgattttttttaattgaaagaatttgagttaagaattatttggggttagagatatggtttaggagaaaggaaggatagagagtagtattttagtgtttttaggatttgggattttttggttttttagtgttattttgggggtggaagggtaagtagaggggaagtgaagttatattcggtttttgtgtgagtatttttatttttttttgatgggttaggaggcggtggggatagggaggtttgttcgggttttttattttttatagtgagatggtttttttttttattttttttggttggaatattatagattgagggtgtggtaggaggtatttttttttgattcgagtagaagttacgttgtgtgagcgagtgtagagtggggtggttggggtggggagtaggggggaggagggaagtcgtgttattaaagggaattgaatgaaatttatgaggttattggtagtttgaataatgtattttgtttatggattagttttttttagtgtagtttggttgatgataattgttttgttttttaaatttttattttagaaatttaattttttcggtttggttttttagggtttttagttgattgttttattttttagaaatttcgagtttttgagaatttgttggttggatattaggttttgaggttaataggtttgagttaaatttttattttgtaatttagaattgcgtgatttaagtaagttatttatttttttagaagttttattttttatttgtaaaggagaatggtgatattagtgttacgaattggttgtgagtttatatttaataatgtttatcgggtatgttgtatttgttaggataaagtggtggataatttttattttgtttaaaaatttttgtttttttggagtttttattttgtagagtaagatagacgataaatttttaagtaatgaaatcgggtgaggttttgaggggtattttataggttatggttttgttagggatagttattgaaaggtttagatttgaggtatgatatagtttgatttagattttaatattttttggtcgggtggggtggtttacgtttgtaattttagtattttgggaggttgaggtaggtggatgatttgaggttaggagatcgagattagtttggttaatatggggaaatttcgtttttattaaaaaaaaaaaaatataaaagttagttaggcgtggtggtttatatttgtaattttagttattcgggaagttgaggtaggaaaattgtttgaatttagaaggcggaggttgtagtgagtcgagattgtattattgtattttagtttgggtgatagagcgatatttcgttttaaaagaaaaaagaaaaaataaaaaaatatttttggttttcgtatttgaagtgtttatttgttttgaagtttttggtatatagaagtagtatttttttttttaggattaatgtttagggcgttatagttgggtttttttttttattttttattaatatcggtttagagttttttggggtgtgatttggaagttttttatttagttagtattgttatatggatatttttatattcggagtttttattttttttaatttatggttttgtttttatatggtttgtggaggaagttgttcgggtttttgttttaggtttcgataggttatttgttttttttgatgtttgtaatttggtttttgtttttgtcggtggaatttgttttggttttattttgttttttaggttttggatttatagtttaagtaagttttgaaatttacgggaatttttttaaaattttagtttttatttattttttttatttaaatttttagattttgggattttatttttttttagattttttattattttttttaaataaacgtgttgaagtttttttattttttttcgggattttttttttagtttagtattttgagtttgcgtttttgtgtttttgtttttcgcgggtttttaggatatcggtttagagtttttttttttttttattggttgtacgtggtttgatttagtgtttttaaaatttgtttagtttagtattgtgtttaaattatttttttttttgtttttgggttttgttacggaaggggtgggatatttattttttttgtatgtttcgagggttcgttgtggagtatgaggtatttggataaggaggaaagggaaaaggataaagtttagttggagattttagttttttagggttattgttttgtggggatagatgttaatttagttttataggtattagttaaagattttcggtatgtatttttgttttagaatgagttttgttgaagtttagtatttgtagatgttttagttaggtttacgaggtttattcgtttttgatgtggggtaaagggggttattagttttagattttgaagtatttttgaattagatttattttaagtttttgtagtttagaattaa

SEQ ID NO: 89 - DNA, 5921 bp, Artificial Sequence
  chemically treated genomic DNA (Homo sapiens)
aaattaattttttttattttgagcggtgagggagtaaattttgaatatatagggaggagcgtgggttttagagttaggcggttttaggggtttggggaggtgggttggggttttggagtttttaagggatgttgatatttttgttttgtttatagttattattgggtttatataggttgtttgtaaatttttttggtattaaggtatttggggttattaaatagtatatgggaggtagaaatgtagatttcgggagtttttattttttaaatgtttgtttattcgttaagataagttttgtgtaaatgggatttagtatttttgggttattggatttatttattagtaagggatttataggggtgttattgattgtgatgttgggataagggattgttttaggtaggtagggacgttcggttattagcgggattgggtttttttttagttaattttgtttttgatggggagttagaggggttaggttggggttatttattttagttttacgacgtgttttttttttcgttatttttgaagttattttttttcgttttgcgtttcggatttatttacgttgaggacggagatcgcggtattaattagtttattatttatagtatttttaggggtgagtggggtttagtttttaataatgttttgtattttttttgtttttgtttttatttttattttgggtagagttggttgggtttttgggttttagggggtcggggttgagtatttttattatttttttaggaaacgtgaatggtatatttattatttatttagattcgggtaattttatcgtggttaggagtgtttttagttttatgattttttttttgttggtgaaggtgaggtgggtatttgtatggggggtagggtagagggggaagggtggaaggtagggcggggggttagggttggggggtcggggtagggttttcgttaagtttgtatttgttttttttgagttttagtttttagcgttagttttatttttaattttattagttattgttgtttttttcgtttttagggttaataggtcgattttgttcgttatttagtgatttaggttatcgtggaggttgtggttgcggtcgggagttcgtttcgttttttttagagattgtatcgtggtatcgtggcgcgtggcgttggagcgggcgttgtggttaaggatgtagttgtttttttttagtttttgaggatttaggtttaggattcggagttttcggtagagagtgtatttaaggttttttttttgtgggtgggttagggttgtacgtgggaggtagtttggtcggggatttaatgagattttgtttaggattttaattcggttattatatatcgaattattaattatttatattttcggatggagggagaggttgtgttgattattattatattggtataggcgggagttttttacgtagaggtgcggggtagggtaggcgggtatttttaagggtgtggggtttaaagatgtgtttaggagggataagtttttttttgttttaggttgaggtttataatacggtgatttttggtatcgtaattatagttattgagatataagttttcgaataggagtttttttttataggtaagtttttttttataggtgagtttttagggttttttaaataagttttttcggtggtttttttttcgcggtaggtgtgtaaggggcgggtagaggtaagtttaagtattgttttcggtttttagatgtttttttatttttagaggttggaggaataattgggttttggattagtattattttcgaggtttttagattttttgagtttttttagggattttttacgattagttttgggggaggtataggtttttatttattttttggtataattttgaggttattaatttcgtttatattcggggggttttcgggtgtagaaaatagtattttttattaattagttattttcggtggggatatagtatagattttaaagttaggaattttttagtcgatgtttttcggtgtgggaattagtattttttattaattagttatatttagtgggggtatagtatagattttagagttaggaattttttagtcgatgttttttagtatgggaattagtattttttattaattagttatattcggtgggggtatagtatagattttagaggtaggaattttttagtcgatgtttttcggtatgggaattagtattttttattaattaattatattcggtgggggtatagtatagattttagagttaggaattttttagtcgatgttttttagtaagagtattttatttttaggtagtatttattttgttgttttttttttttgatttcggttattggttggtatgggaaacgttgtaggaagggtttattttaggttgatttggtttgattatgaaattttaaagaggagtttgtttgggattgatagatatagataggtttaaggtttttagtgaggtaatttgtgatgtgtgtaggatagaggttagatgtggggtttagcgaattttacgatttttacggttgtcgtttattttgtaagtttttgtattttttgtgagtttttgtgagtagtttggtttttcgggggggagggggtgggtagggtttcgatgggatatataggttttttgagttagggttagtagagtttgagatttgggagatagtttaggtttgggtggaatttaagtgttttaagtttggtataggttggtatgggaaatgtttggggtatttaatagtgcggggatgatgacgttttttattgcgatgttaggtggcggtttttcggaggataagcgtttttcggtggtggatatggcggttttgggcggggtgttgggtgcgttgttgttgttggttttttttggtttcgtcgtttttgtttataagtattatggttttcggtttaagtgttgttgtggtaaagtttcggtgaggtttaggatggagaatagggtaggcgattaggtaggaagtgggggacgggggataggagaggggagggtagagggatagatgtggagacggaggggtgtttagcgtggaatgagggtgtgtagggttaaggttgtagagatttagggatttcgttgacgtttcgattttcgtttgtaggagttttagttttaaggttttgataattaggcgtttttttttgattataaggttaattgggcgttcgtttttagttttacgtacgattttaagttcgcggaggtatcgatgttcgtagagttcgtatttttcggttttgttttttttaggcggtgtttttgagtttttcgtagcggttcgagttggcggaagttttacggcggtgaggtttattttgattaaggagcggcggtcggagggcgggtataaggttgtttggtttggcgaggatatcgggacggaggtagacgtggtcgtttttaacgcgtttattttggacgtggatggcgttagtgatttcggtagcggcgatgagggcgagggcgcggggaggggtgggggtttttacgatgcgttcggtggtgatgatttttatatttaagtggtttttttatttttttttttagtcgtacgggtattggaggtttcgtttttttagttttcgattcgaggtagaataaagtaaggttttcgaaatttaggttatggcgtggggtaggcgcgcgggtttatgggggttttatttatttagttttttgtcgttattagcgtttgagtttaggtgtgtagatgaggcggtgggtttggttacgttgtttttattttaaggttgtagtatttttcgtaaattatttgtagtgttcgtcgttttttcgaggttttgtgttagttagtttgggaagtttttttttcgttttaattatagttcgaggggggtttttttttttcgatttgtatcggagattttaggtattcggtttattttagatttttcgttttcgattttatatagagattgtttggggaggttgaggagtcgatgtaaatttttaaggcgacgtatttgggagtcggtggttttaaatatttgtcgggggttttagtttttttttgaaatttatatgtttgggttggagcgtagtagtaaatattttgtttagtgatttggattgaggcgcgttgggggtgggtgcgtcgtgtggtttgagtaggagttagattaggaggtttaggggtgagagatatatttttttcgttgtttttaaagttagagtttaggttgggcgtttatgtttagaattattaagggattttttgcggtttgttagtattttttttaatggaaatatattattaatttttttttaaatgttttaattgtgagagtatttgatatttttgattgaataatgtaaaaaatttaaagggggttgcgtacggcggttttcgtttaaattttagtattttgggaggtcgaggtgggtagattatttgaggtcgggagttcgatattagtttgattaatatagagaaatttcgtttttattaaaaatataaaattagtcgggcgtggtggtttatgtttgtaattttagttattcgggaggtttaggtaggagaattatttgaattcgggaggcggaggttgtggtgggttaagattgtgttatcgtattttagtttgggtaataaaagcgaaattttattttaaaaaaagaaacgtaaacggtgtagttgtttttttttcgaggtacgtttattttttattatttatttttttttttttttgagattgagttttgttttgttttttgggttgtagtggagtggttttatttcggtttattgtagttatttttaacgttttttatttttttttatttcgcgttggtcggggcggggtttcgttggtcgtatttaataataagaataggcggcgcgcgtttttttcggaaattttcgtttggttattataaaagcgtcggtttttcgttttttcgcgagacgaaatttttcgtttcggcggttttggtatttaggtattggggattttagatttacgcggtgtaggtcgggagcgagagttttcgtgggggtttcgtgatttcggaggggtagagttaagagttgggggagtttgagagatgagggtcgggcggggagggaggcggaggcggaggcggggtttcgcggagttgagaatcggacggggtgggatcgaggagggtgcgaagcgttattgtttaggtttcgttttttcgggagtttgattcgtttttgacgtcgtttttttcgttttcgtagggttcggtttgcgttttttcgttaggtttggatattggtttaatatttgtgattttatgtgtgcgcgtcggttatatttgtagttatatttgtagttttttttgttaagagatttatatcgaggtagcgtcggtggttataagtttttagtttatatttgtggatatttgtgatatttggttatacgatttgtggtcgcggtttggcgtttgttgcgataggagtttttattttttttgttataatatttgatcgttatttaattgtttttgtagaaggagtaatggttttggtttttgagaggtaagagttcggtttattttttttagatgttagttttcgagcgttttgtagtcggttttgatttttcgcggtcgggtattcgtagggtagttttacgcgtgttgttcggagagtggttttttggagagattagtagcggttgttatgaggggttgtagtggttggacgaggttcgtatttgttttcgcgtgttttggaagtatttcgcgcgtaaggatttgagcgaggtcgacgcgcgtatttttaaggtggggattttagtttcgtttcgtttcgggtgggagagttcgtttaggatttcgcgggttcggtatacgtgttttgtttttttttttagg

SEQ ID NO: 90 - DNA, 5921 bp, Artificial Sequence
  chemically treated genomic DNA (Homo sapiens)
tttgaagagggggatagaatacgtgtgtcgggttcgcggggttttaggcgggtttttttattcggggcggggcggggttggggtttttattttgaagatgcgcgcgtcggtttcgtttaggtttttgcgcgcgaagtgtttttagggtacgcggaaataggtgcgggtttcgtttagttattgtagttttttatagtagtcgttgttgatttttttaaggagttatttttcgaatagtacgcgtggggttgttttgcgggtgttcggtcgcggagagttagggtcggttgtagggcgttcggggattggtatttggagagggtgggtcgggtttttattttttaggagttaaggttattgttttttttgtaggggtagttaggtggcggttaggtgttataataggggaggtaagggtttttgtcgtagtagacgttaggtcgcggttataggtcgtgtggttaggtgttataggtgtttataggtgtggattgagggtttgtagttatcgacgttgtttcggtatggattttttggtagagggggttataggtgtgattgtaggtgtggtcggcgcgtatatatgaagttataggtgttgaattagtgtttaggtttggcgggaaggcgtaggtcggattttgcggagacgggaaaggcgacgttaggggcgggttaggttttcgggaaagcgaaatttaaatagtggcgtttcgtatttttttcgattttatttcgttcggtttttagtttcgcggaatttcgttttcgttttcgttttttttttcgttcgatttttattttttaggtttttttagtttttggttttattttttcggggttacggagtttttacggaggttttcgttttcggtttgtatcgcgtgggtttggggtttttagtatttgggtgttagagtcgtcgggacgggaagtttcgtttcgcggggaagcggagggtcggcgtttttatggtggttaggcgggagttttcgggaagggcgcgcgtcgtttgtttttattattggatgcgattagcggaatttcgtttcggttagcgcggagtagggaggagtggagggcgttgggagtggttgtagtgagtcgagatggagttattttattatagtttaggggatagagtaagatttagttttaaaaaaaaaaggaagtgggtaatgggaggtggacgtgtttcgaaaaaggggtagttgtatcgtttgcgtttttttttttgagatggagtttcgtttttgttatttaggttggagtgcggtggtataattttggtttattataattttcgtttttcgggtttaagtgatttttttatttaagtttttcgagtagttgggattataggtatgaattattacgttcggttaattttgtatttttagtagagacggggtttttttatgttggttaggttggtgtcgaattttcgattttaggtgatttgtttatttcggttttttaaagtgttgggatttaggcgagagtcgtcgtgcgtagttttttttgggttttttatattgtttagttaagaatattagatatttttataattaaaatatttggaaaggaattaatggtgtatttttattagggaaagtgttgataagtcgtaagggattttttgatggttttgggtatgggcgtttagtttgggttttggttttgggagtagcgaggggaatgtgttttttatttttaggttttttggtttggtttttgtttaggttatacggcgtatttatttttagcgcgttttagtttaggttattgggtagggtgtttattgttgcgttttaatttaagtatgtagattttagaaggggattaggattttcggtaggtgtttgagattatcggtttttaagtgcgtcgttttgggggtttgtatcggttttttagtttttttaggtaatttttgtgtagggtcgggagcgggaggtttgagatgagtcgggtgtttgagattttcggtgtaggtcgggggaggggagtttttttcgggttgtggttagagcgggagaggaattttttagattagttggtatagagtttcgggaaggcggcgggtattgtaggtggtttacgggaagtgttgtagttttggggtggggatagcgtggttagatttatcgttttatttgtatatttgggtttaagcgttaatgacgataggggattgagtgaatgggatttttatggattcgcgcgtttgttttacgttatggtttgggtttcgggagttttgttttattttgtttcgggtcggaggttgggggagcgagatttttagtgttcgtgcggttgggggagagggtggaggggttatttagatgtaggagttattattatcgggcgtatcgtagggatttttattttttttcgcgttttcgtttttatcgtcgttgtcggagttattggcgttatttacgtttagggtgggcgcgttgagaacgattacgtttgttttcgtttcgatgttttcgttaaattagatagttttgtattcgtttttcggtcgtcgttttttggttaggatggattttatcgtcgtggggttttcgttagttcgggtcgttgcggggggtttaggggtatcgtttggggagggtagggtcggggggtgcgggttttgcgggtatcggtgttttcgcgggtttggggtcgtgcgtggggttggggacgggcgtttagttggttttgtggttagggaggaacgtttggttgttaaagttttggggttggggtttttgtaggcgggagtcgaggcgttagcggggtttttgggtttttgtagttttggttttgtatatttttattttacgttggatattttttcgtttttatatttgtttttttgttttttttttttttgtttttcgttttttattttttgtttggtcgtttgttttgttttttattttgggttttatcggagttttgttatagtagtatttgagtcgggggttatagtgtttgtggataaggacggcgaggttaaggagagttagtagtagtagcgtatttagtatttcgtttagggtcgttatatttattatcgagaagcgtttgtttttcgaggggtcgttatttggtatcgtagtggaaaacgttattattttcgtattgttgagtgttttaggtattttttatgttaatttgtgttaggtttgggatatttgggttttatttaggtttgggttgttttttaaattttaggttttgttgattttggtttaaggggtttgtgtgttttatcgagattttgtttattttttttttttcgggaggttaagttgtttataggagtttataagaggtgtagggatttgtagggtgagcggtagtcgtgggaatcgtgggattcgttggattttatatttggtttttgttttatatatattataggttattttattgggggttttgggtttgtttgtgtttgttagttttaaatagatttttttttgggattttatggttaggttaggttagtttggggtggattttttttatagcgttttttatattagttaatgatcggagttagggagggaaggtaatagagtgggtgttatttgaagatggggtgtttttgttgaggggtatcggttgagaggtttttggttttggggtttgtgttgtgtttttatcgggtgtggttggttggtgggaggtgttggtttttatatcggggggtatcggttgagaggtttttgtttttggggtttgtgttgtgtttttatcgggtgtggttggttggtgggaggtgttggtttttatattggggggtatcggttgagaggtttttggttttggggtttgtgttgtgtttttattgggtgtggttggttggtgggaggtgttggtttttatatcggggggtatcggttgagaggtttttggttttggggtttgtgttgtgtttttatcgggagtggttggttggtgggaggtgttgttttttgtattcgggggtttttcgggtgtggacgaggttggtggttttagagttgtgttagagggtggatgagggtttgtgttttttttagagttggtcgtggagggtttttgggagggtttagggggtttggggatttcggaagtggtgttggtttagggtttagttgtttttttagtttttggggatggggggatatttgggggtcgggaatagtgtttgggtttgtttttgttcgttttttgtatatttatcgcgggaaaggagttatcgaaggggtttatttggagaattttgggggtttatttgtggaggggggtttatttgtggaggggggtttttgttcggaaatttgtattttaatgattgtggttgcggtgttagaggttatcgtgttgtgggttttaatttggggtaggaaggggtttgttttttttagatatatttttaagttttatatttttggagatgttcgtttgttttgtttcgtatttttgcgtagaaggttttcgtttgtgttagtgtggtggtggttagtataatttttttttttattcggaagtgtgagtggttggtaattcgatatgtgatggtcgagttgaggttttggatagggttttattgagttttcggttaggttgttttttacgtatagttttgatttatttatagaggggaggttttggatgtattttttatcgagaatttcgggttttgagtttggatttttagaggttgagaaggggtagttgtatttttgattataacgttcgttttagcgttacgcgttacggtgttacgatatagtttttgggggaagcggggcgggttttcggtcgtagttatagtttttacggtgatttgggttattgagtagcgggtaaggtcggtttgttggttttggaggcgggggaggtagtagtgattagtggggttgaaggtggagttggcgttgaaggttggggtttaggaaaggtaggtgtagatttggcgggggttttgtttcggttttttagttttgatttttcgttttattttttatttttttttttttgttttgttttttatgtaggtgtttattttatttttattagtagaaggaaggttatggggttggggatatttttggttacggtgaggttgttcgagtttgggtggatgatgaatgtattatttacgttttttgggaggatgatggaagtgtttagtttcggttttttgaggtttagggatttagttagttttgtttaaggtggggatggagatagggatagagggggtatagggtattgttgagggttgggttttatttatttttaaagatgttgtagatgatgggttggttgatgtcgcggttttcgtttttagcgtagatgggttcgggacgtaggacgaggggagatggttttagggatggcggaagggagggtacgtcgtggggttggggtggatggttttagtttggtttttttgattttttattaagggtagggttggttgaggaggggtttagtttcgttggtggtcgggcgtttttgtttgtttaggatagttttttgttttagtattataattagtaatatttttgtgggttttttattaatgaatgagtttagtggtttaaagatattgagttttatttgtataaggtttgttttgacgggtaagtaaatatttaggaagtgggggttttcggggtttgtatttttgttttttatgtattgtttggtggttttaggtgttttggtgttaggaaggtttgtagatagtttgtgtgggtttagtggtgattgtgagtagggtagagatgttagtattttttaagagttttagggttttagtttatttttttaggtttttgagatcgtttggttttggggtttacgtttttttttgtgtgtttagggtttgtttttttatcgtttaagatgggaagggttggttt

SEQ ID NO: 91 - DNA, 9254 bp, Artificial Sequence
  chemically treated genomic DNA (Homo sapiens)
tgggggaaattgattttatgatttaattatttttatttgattttatttttgatatgtgaggattattataatttaaggtgagatttgagtggggatataattaaattatatgagtggatatgtaatatgagtgagaaataattttgtgattgtaatttagtaagatttttggatggttaatatagtataatttagagtatatggaggtgtgtatttttagttttttgattttcgggtatttagtaggattgtatttttttgtattttttaagtaaggtatggttatgtgattaattttagttaataatatgtaaatataataaaaagtgttatttttaggagggagtttttaaagttaatgtgagtttattatgtttttttttttttgttaaattgatgcgatgattgttgaagtatgtattaagatgaaattttttttagattaggtttttaaatgagtatattaagtagagtttcgtgaagttgaatatgtagtatgagtaaaatataaaatttatttttaagttattgaaattttaggattgtttgttatggtagtataatttaaattattttgatttatataaaaattggtttttagatatgggttagtgtaataataataataagtataataataataaaattaaataattatttagagggcgataattaagaatattgttattagaagttgaagggatggtgatttgtttggtaaatatattatttgtgataatgtagaaggtagattatgaatttgatgaattaaagaaaaggattgtaaaatagagagtgagtagtgtgtgttggtggttgttggatgtattttgaaagttattataagttatttaaagatgaatttagaaaaatttggtttgtttgtaattaggaatgaaatggaatagagaaaatttataaatttagggatttatatcgttagaagaggtaattgttttttagtttcgattggtaaaatataaaattaagaaatatttttagtaagaaaggatttggaagaaattaagttttgaagtaaggattaagttataaagtatgaatttattattaaaattttaggataggaggtcgaggaggacggattatttgaggtcgggagttcgagataagtttgattaatatggagaaattttgtcgtttttaaaaatataaaattagtcgggcgtggtggcgtatgtttgtaattttagttatttaggaggttgaggtaggagaatcgtttgaattcgggaggtagaggttgtagtgagtcgagattgtgttattgtattttaattagggtaataagagtgaaatttcgttttagaaaaaaaaaaaaaaggattaattaagattttatttagtatatatttttaattggataaaatggttttgggaaaaggaagaaaggtttaatttttttattaaaatttaataagtttaaagtgtttaaaattaagtgaagagtaagagagtgagacggtaaaagagagatagaggagttaataggtaggagagtaggaaagtaaagagatatggtaaattaaagaagtatgtttggaaaagaattttgtggttattgttatatggaatattttatattagatagataagaagtttatttatatatatttaagatttaatgttattttgtatttttttaatttttaaaagtttatttaaaagtatattttttaatgtttgttttagttgtggaaaaggaagatttttcgagggtaaatttaggagttatggaaaataatgggtagggtagtttggtgttgtgattggatgggtttttaaggttgttttttttgaataaagaatgagggaattttattaggggaaggagagtagattaaatatttggtgaatagaaagggagatagagtttttagtgttattttttaaatatttttggagagttttttgagatatttggtaggattatagtgatttaaagaggtatggttatgtgattgttttggttaatgatgtatgggtagaagtgatgtgtgttataagtggatgttttgatagttatgatgtttcgagttttttttttatagttaggatagttgtgaaaaggggtattaatacgaggttttttttagtttgagttttttagtgattataatgagtagagttattttgttaatttataacggttatgtagtagaaatgattaatttttattggaataagttattgatatgttagggttgtttgttagggtagtataatattgttttttttgatagaattgggagtgagagataaggttggagagagaaggagttggattgtgaaaagttttttttttaaggtataggaatcggaatttttttgattgtaaggaaaagttaatgaaggtttttaagtaggggcgttaatatgaatagatttgttatttttttggatgaaatatgttattttttaatataaggagaagattagtttattaaattatatgaggtagagaggaatatatagaattttaggtaaaagatatatatttatgtaaagttttaagttttgaaatttttaaatataagagttttgaacggagttatagttagaggattaggtaagaaaattttttttatgttataagcgttattttttttgtagataattaatattttataagaaagtttgttagagtagagaaaatataaaggaatgtaatatagatttgaggttaatttttagttgtttgtgtgattttaataaagatatttaatttttttgggtttatttttttatatgttaaatttggataataatatatgttttttaagatagttgtggggagaaaatagcgtatttaaattgtttaggagaatgtttggtagataataagtgtttaatatatgaaattgatttttattattgttattaaaaaatatttagaatattaattttttgaatataatagaaaatgatttagggtaatagatagaggagaatgttttttttttgaggaagtaattggattttgttattattgtatatttatttattttattttttttttagtttagtgtttggtttatagtaggtttttagttattttttgtagattagtgaaagttaggtgagtgttcggagtgaagaaaagttggtaggttttttattgatattagttgttgttggtttttgaatatttaaagtcgtaaatattttagggttgggggtaatgaatttaaggttgaattttaagtttagaagtagcgaagtttgaatttagaatttaggaatttaaattgttgtaggtttaattttaagttttagttttagatagaggtttgggaaagatttgatttttaattcggtttttttttttttttttttttcgatgttttttataggaaagtatatttggttttgttaaatcgtatttttatattttggtattttatttaggttttgcgaggatggaaattgcgaggtaggggagggaagcgggttgtttggttattatttttttagtgttgtaggcgattttgttatattaatttttggtagtttagtgaggtggacggtatcggttttatttgtagatgagggaaatgaagttcggaggagtttcgtgatttgtttgttttatattgtggtagtttggttacgaaagaattaggattttcgatttcgggattttttttattatatattttcgtttttaaggggtggggggcggggggagaataaaataatcgcggaaaaggaattatttatatgtgtttagcgttttttagaggttatttaggatatgcgtttattattcggtcgggagtgtagagatttgaagtttaggttttatttcgggtttcgagtattattgcgtgattttatgcgagtgttcgtcgttttttgggtttgttttttcggaagtaattcggcgcggatggagtgtgtgtgtgcgcgcgcgcgcgcgttatgttgtgcgtgttgtgttaagcgtgtgcgtgttgttcgggggcgggagggggagtagattaatatcggggtttttcgagtttcggatcgtttatacgtttgtttttatttggattttgttatttattaattgcgtttattataaaaattgttttttcgaggtaaagttgtgaattttcgcgtttttttttttacggtttcggaggatgaagtggggtgtaacggagatttagttgagcgtttagtttcgggtaatataaatttttcggtttttacgagtagttagacgatttcgcggatcgtcgtttttgaatttgatcgagatgtaaatttcggagtgtttttaacgtggggggtcgattttcgggagatcgtttttaaatttaagtttttttaggttcgtttttatttgggattttatagagttattttaagggcggtattttcgttttttcggaagtgcgggggggtggtagcgtatttggatttttagtttttagtttcgcgcggtggcggtcgtcggtggatgatttcgggttttataagtggggaaataataattatttttcgttcgtatttttggtttaaaataattggttaggttttttggtttttcgggtttttgtatttttcgtattttcgttcgtagtcgtgaatttgagtttttttttattagaggttgcgagcgttcgttcgttcgcggtagttatcgttattagatagttaaattttaagacgttagtttataatgtatcgggcgggtcgggaaaaacggttcggggaggggatcggggaagagagggtcgagaggcgtgcggtaggggggagggtaggagaaagaagggttcgattgtaggagggtagcggagtattattttatttcgtgagttttcgcgggtttagagaagaattttttagggtggagtttttatggtgacgggcgggttcgtttttttgagagcgacgcgagttaatgggaaggttttggggtgatattatgggttatttttaggggttgattggtagtagataagtgttgagttcgggttggataagggtttagagttgtattgagtgtggttgaagtagcgaggcgggagtggaggtgcgcggagttaggtagatagatagatatagttagttagttaggtcggtagtatagttcgaattgtaaattttattttttttttattttttttttaattgtttagagttagcgtttgtggttttcgggttggtgtttcgggagtgtttagagagtttggtttttagtcgttttcgggaggagagttttgttgtttaggcgttgttgatagcggcggaaagtagcggtatttacgcgttcgtcgggggaagtcggcgagcggttgtagtagtaaagaattttttcggttgggaggatcggagataagtggtagagtttcggagttaatttttgtaagttttttttgcgttttaggtttttttacggcggtaaagattagaaggcggcggagagttacgtaagagaagaaggacgtgcgtttagtttcgttcgtatcggttgttgaatttgggcgagcgcgagtcgcggttgtcgggcgttttttttttttagtagcggaggaggggataagtcgtcggagttcgggcggttaagattcgtcgtcggtcggttattgtagggttcgtattgattcgtttcgcggggagagtcgttgttttgggaagtgagttcgtttgcggatttcgaggaatcgttgcgtacgaagagcgtttagtgagtgatcgcgattttttaaagtcgggtagcgcgcgcgagtcgataagtaagagtgcgggaggtattttaattaattttgcgttttttggagcgagttggtgaggagggcgtagcggggacgatagttagcgggtgcgtgcgtttttagagaaattttttttgttaaaggtttcggggggcgcgggtgtttttcgtttgttatagttttgttgcggtttcgaaatttgtgcgcgtagtttaaattaattttacgtgaagtgacggattgttttatgattgtaaagatggaaacgattttttatgacgatgtttttaacgtttcgtttttttcgttcgagagcggattttatggttatagtaattttaagattttgaaatagagtatgattttgaatttggtcgatttagtggggagtttgaagtcgtattttcgcgttaagaattcggatttttttatttcgttcgacgtggggttgtttaagttggcgtcgttcgagttggagcgtttgataatttagtttagtaacgggtatattattattacgtcgatttttatttagtttttgtgttttaagaacgtgatagatgagtaggagggtttcgtcgagggtttcgtgcgcgttttggtcgaattgtatagttagaatacgttgtttagcgttacgtcggcggcgtagtcggttaacggggtaggtatggtggttttcgcggtagtttcggtggtagggggtagcggtagcggcggttttagcgttagtttgtatagcgagtcgtcggtttacgtaaattttagtaattttaatttaggcgcgttgagtagcggcggcggggcgtttttttacggcgcggtcggtttggtttttttcgcgtaattttagtagtagtagtagtcgtcgtattatttgttttagtagatgttcgtgtagtattcgcggttgtaggttttgaaggaggagttttagatagtgttcgagatgttcggcgagatatcgtttttgttttttatcgatatggagttttaggagcggattaaggcggagaggaagcgtatgaggaatcgtatcgttgtttttaagtgtcgaaaaaggaagttggagagaatcgttcggttggaggaaaaagtgaaaattttgaaagtttagaattcggagttggcgtttacggttaatatgtttagggaataggtggtatagtttaaatagaaagttatgaattacgttaatagtgggtgttaatttatgttaacgtagtagttgtaaatattttgaagagagatcgtcgggggttgaggggtaacgaagaaaaaaaataatatagagagatagatttgagaatttgataagttgcgacggagagaaaaaagaagtgttcgagaattaaagttaagggtatttaagttggattgggttgcgttttgacggcgtttttagtgtgtacgagtgggaaggatttggcgcgtttttttttggcgtggagttagggagcggtcgtttgcgggttgtttcgttttgcggacgggttgttttcgcgcgaacggaacgttggatttttcgttaatattgattaagaattgtatggatttaatattcgattttatttagtattaaaggggggagggggagggggttataaattgtaatagagattgtagattgtttttgtagtattttttaagaatataaagcggggggagggttggggaggggcggtaggagggaggtttgtgagagcgaggttgagtttatagatgaattttttttggtttgttttcgttaattgtgtatgtatatatatatattttttaatttgatgaaagttgattattgttaataaatagttttatgtttttgtaagttattttttgtttgtttgtttgggtattttgtttagtgttgtttgtaaataagagatttggagtattttgagtttattatttgtaataaagtatataatttttttatgttttgtttttgaaaattttagaaaggatatttaagaaaatataataaattattggaaagtatttttttaattttttttttgtattatttgtagatattagttatttaggtggagttgaaagagttaagaatgtcgattaaaattatttttagtgttttttattattaagtagtaaaaattgttttttattagattttagaaataaatgtatttgatgtatttgatgttatggttaggttatatttttttttttttagttatttatatggaattgtttattaaaggatagtgcgatgttttaggaggttggaggaaggggggttgtagtggagagggatagtttattgagaagttaaatattttaaagtttggattgtattaagtggtatgtgttgtgattatttataatgttagtagaaattttataataggtgtttatttttaaagtaggaattggtggtagattttataaaagatgtatttttttaatttggaattttttttttgataatttttagataaaaagatggtttttgtttatgaatatttataatagtatttttgttataataaatgtatttaaatattaataatagattttgaattgtttttttttattatttttttttttttaagttatatattgaagtttttatttttagttgttgaggttaatattgttgtaatttgaagtgatttgaaaattaagaagtaaagaatttaggaagagttaaattagaagttgtgatttgaatgaaatagttttttaattttattaattttttttttttttttttatttttatttttttttttattattttatttttaaataaatttttatgtttatggaaattaatagtttagtattttgggtttgtttgtagtttattttttaatttgtttttaaaataattaattttgtttaaatatagaataagttttaaaagatagtaatttaatattatggaaaagatttataagagaaaatatgaattagtattaatttaatgattatatgcgtaaattaaattttagttttggggaaatgggaaatttgaattttatttatagatataatttaggagattaataaggtagtgtttaataagggaataattttttgtttggttgttttttatattaagagttagtgtgattattaggtagtaaaagtaatttgatatttaggaatattttataaattattaattgagttagggttgtttgtttattagtagtgttttagtatttagtaggtttgggagtgttaatattttgtttgtggttgtaaatttaaatatataaagagtttttttttaggagtatatttaggagtggaagagattggataggtttgttagtttcggattttttgtaataatattttttgaataaagggttattgggagtagagtttagtttgttaaattgaatttgtcgatgttagtaattcggaaggtgagatgattttgattatatgtagaaatagtagagggataataaagtattttggggtggggttttgtggaagttaaataagagttaattagaaaaaataagtaggttggggaattaattatttgtaaagg

SEQ ID NO: 92 - DNA, 9254 bp, Artificial Sequence
  chemically treated genomic DNA (Homo sapiens)
tttttgtaggtaattaattttttagtttgtttattttttttagttggtttttgtttagtttttatagagttttattttaaaatgttttattgtttttttgttatttttatatatggttaaaattattttatttttcgggttgttgatatcggtaaatttagtttggtaaattgggttttgtttttagtaattttttgtttaagaagtgttattataaaggattcgaagttaataagtttgtttaattttttttatttttagatatatttttaaggagaaattttttgtgtatttggatttatagttataggtaggatattagtatttttagatttattgggtattagaatattgttaatgagtaaatagttttgatttaattagtggtttgtgaaatatttttggatattaaattgtttttgttgtttgataattatattggtttttggtatgaaaagtaattaagtaaaaaattgtttttttgttaagtattgttttgttgattttttaagttatatttgtaggtagaatttaagttttttatttttttagagttgaggtttgatttacgtatgtaattattgagttagtattagtttatgtttttttttgtgaattttttttatagtattagattattattttttgagatttattttatatttaaataaggttgattattttagaaataaattaagaaataagttatagatagatttaaaatgttaaattgttagtttttataggtataggggtttatttgggggtgaggtagtagagagagagatagagatggagaaagagggaaagaattaatgaaattgggagattgttttatttagattataatttttagtttgattttttttaaattttttgttttttaatttttaaattattttagattgtagtaatgttaattttagtaattaaaaataaaaattttagtatataatttgggaagaaaaaagtagtaaagggaagtaatttaagatttgttattggtatttgaatatatttattgtgataagaatgttgttataaatatttataagtaaaggttatttttttatttaggaattgttaaagagaagattttaaattggaaggatatattttttgtaaaatttgttattaatttttgttttgagaataagtatttattgtaaaatttttattaatattataaatggttatagtatatgttatttgatataatttaaattttgaaatgtttgattttttagtgggttgtttttttttattgtaatttttttttttttagttttttgaaatatcgtattattttttggtaagtaattttatatagatagttgggggaggaggagtataatttgattatagtattaggtatattaggtatatttatttttaaagtttaatagagaatagtttttattgtttaatagtaagaagtattgagagtgattttaatcgatatttttaatttttttaattttatttagatagttagtatttatagatgatgtagaaaagaggttaggggagtattttttaatagtttattgtatttttttaaatattttttttggaatttttagaaataaaatataaaaaaattatatattttattataaatggtaaatttagagtgttttaaattttttatttataaataatattgggtaggatatttaaataaataaataagaaataatttataaaggtatgaagttgtttattgatagtaattagtttttattaaattaaaaaatatatatatgtatatatatagttaacgaaggtaggttagaaagagtttatttgtaggtttagtttcgtttttataaattttttttttgtcgtttttttttaatttttttttcgttttgtgtttttaaggagtattatagaagtaatttatagtttttattgtagtttgtaatttttttttttttttttttttaatattgaatgagatcgaatgttaggtttatgtagtttttggttaatgttaacgaaaagtttaacgtttcgttcgcgcggggatagttcgttcgtaaagcggggtagttcgtaggcggtcgttttttggttttacgttaagggagggcgcgttaagttttttttattcgtgtatattgggggcgtcgttaggacgtaatttagtttaatttggatatttttggttttagttttcggatatttttttttttttttcgtcgtaatttgttaagtttttaagtttgtttttttgtgttatttttttttttcgttgttttttagttttcgacggtttttttttaaaatgtttgtaattgttgcgttagtatgagttggtatttattgttaacgtggtttatgattttttgtttaagttgtgttatttgttttttgagtatgttggtcgtggacgttagtttcgagttttgagtttttaaggtttttatttttttttttagtcgggcgattttttttagttttttttttcggtatttggaggtagcgatgcggttttttatgcgtttttttttcgttttgattcgtttttgggattttatgtcgatgggggataggggcggtgtttcgtcgggtatttcgggtattgtttgaggttttttttttagggtttgtagtcgcgggtgttgtacgggtatttgttggggtaggtggtgcggcggttgttgttgttgttggggttgcgcgggaaaggttaggtcggtcgcgtcgtaggagggcgtttcgtcgtcgttgtttagcgcgtttgggttgaagttgttgaggtttgcgtagatcggcggttcgttgtgtaggttggcgttgaagtcgtcgttgtcgttgttttttgttatcgaggttatcgcgggagttattatgtttgtttcgttgatcggttgcgtcgtcgacgtgacgttgggtagcgtgttttggttgtgtagttcggttagggcgcgtacgaagttttcggcgaagtttttttgtttatttgttacgtttttggggtataggaattgggtgggggtcggcgtggtggtgatgtgttcgttgttggattggattattaggcgttttagttcgggcgacgttagtttgagtagttttacgtcgggcgaggtgaggaggttcgagtttttggcgcggaggtgcggttttaggttttttattgggtcggttaggtttagggttatgttttgttttaggattttggggttattgtagttataaggttcgttttcggacgggaggaacgaggcgttgagggtatcgttatagaaggtcgtttttatttttgtagttatagaatagttcgttattttacgtgaggttagtttgggttgcgcgtataagtttcggggtcgtaatagggttgtggtaagcgggggatattcgcgtttttcggagtttttgatagggaaagtttttttaagagcgtacgtattcgttggttgtcgttttcgttgcgttttttttattagttcgttttagggagcgtagggttaattaagatgtttttcgtatttttatttgtcgattcgcgcgcgttattcggttttgaaaagtcgcggttatttattgagcgtttttcgtgcgtagcggtttttcggagttcgtaggcgaatttattttttagagtagcggtttttttcgcggagcggattagtgcggattttgtagtggtcggtcggcggcgggttttggtcgttcggatttcgacgatttgttttttttttcgttgttagggggagggggcgttcggtagtcgcggttcgcgttcgtttaagtttaataatcggtgcgagcgaagttgagcgtacgtttttttttttttgcgtggtttttcgtcgttttttggtttttatcgtcgtggagaagtttaagacgtaggaaaggtttgtaaaagttggtttcgggattttgttatttgttttcggtttttttagtcgggaaagttttttgttgttgtagtcgttcgtcgatttttttcggcgggcgcgtgggtatcgttgtttttcgtcgttgttaatagcgtttgggtagtagggtttttttttcgggggcggttggagattaggttttttggatattttcgaaatattagttcgggagttataggcgttagttttgggtagttagagagaaggtgaaaagaaaataagatttgtagttcggattatattgtcgatttggttggttggttgtgtttgtttgtttgtttgatttcgcgtatttttattttcgtttcgttgttttagttatatttagtgtaattttgagtttttatttagttcgagtttaatatttatttgttattagttaatttttaaaaatagtttatgatgttattttaaggtttttttattggttcgcgtcgtttttaggggggcgggttcgttcgttattatggagattttattttagaagatttttttttgggttcgcggaggtttacgggatgaggtaatgtttcgttgtttttttatagtcgggttttttttttttttatttttttttttgtcgtacgtttttcggttttttttttttcggtttttttttcgggtcgtttttttcggttcgttcggtgtattgtgggttgacgttttggggtttgattgtttagtgacggtggttgtcgcgagcgggcggacgttcgtaatttttgatggaggggggtttaagtttacggttgcggacggggatgcgggggatgtagggattcgggaggttagggaatttggttagttgttttgggttaggggtgcgggcgaggggtggttgttgtttttttatttgtggggttcgaagttatttatcggcggtcgttatcgcgcggggttggaggttgagaatttaagtacgttgttattttttcgtattttcgggggggcgggaatatcgtttttaaggtggttttgtgaagttttaggtgggggcgagtttaaggggatttaagtttaggggcggtttttcgagagtcggttttttacgttgagaatatttcgaagtttgtatttcggttaagtttaggagcgacggttcgcggggtcgtttggttgttcgtagaagtcgagagatttgtattgttcgaaattggacgtttagttgagttttcgttgtattttattttatttttcgggatcgtgggggaaagggcgcgggggtttatagttttgtttcggaggggtagtttttatagtgggcgtaattggtgggtaatagggtttagatgggaataagcgtgtaggcgattcgaaattcggggaatttcggtgttagtttattttttttttcgttttcggataatacgtatacgtttaatataatacgtataatataacgcgcgcgcgcgcgtatatatatattttattcgcgtcgagttgttttcgggaaaataagtttagaaggcggcggatattcgtataaagttacgtagtagtattcggagttcggggtagaatttggattttaaatttttgtattttcggtcgggtggtgggcgtatattttgggtagtttttaggaagcgttagatatatgtaagtggtttttttttcgcggttattttatttttttttcgttttttattttttagggacgaaagtgtgtggtggaaagaatttcgaagtcgggaattttggttttttcgtggttaggttattatagtgtgaagtaagtaaattacggaattttttcgagttttattttttttatttgtaggtggggtcggtgtcgtttattttattgggttgttaggagttagtgtgatagggtcgtttgtagtattagggaggtggtggttaaatagttcgttttttttttttgtttcgtagtttttattttcgtagagtttggataggatgttaggatataagagtgcgatttggtaggattaggtgtatttttttgtgagaagtatcgaggggaggaggggagggggaatcgggttagaagttagattttttttaagtttttgtttaaaattggggtttgaagttggatttgtagtagtttaagtttttaggttttaaatttagatttcgttgtttttgaatttggaatttagttttgggtttattgtttttagttttaaggtatttgcggttttgagtgtttagaaattaatagtagttggtattagtgggaaatttgttaatttttttttatttcgggtatttatttagtttttattgatttgtagagggtaattgaaagtttattgtgagttaggtattgagttggggagggggtggggtaggtaggtatatagtgatgataagatttagttgtttttttaaggagagaatatttttttttgtttgttgttttgaattattttttgttgtatttagggagttggtgttttaaatattttttaataatagtaataaaaattagttttatgtattaaatatttattatttgttaggtatttttttaagtaatttaaatacgttgttttttttttataattgttttgagagatatatattattatttagatttaatatgtgaggaaataggtttagagaggttaagtatttttgttgaggttatataggtagttggaaattgattttaggtttgtgttatatttttttgtattttttttattttggtaaatttttttgtggagtattagttatttgtagaggaaatagcgtttgtggtatagaagaaatttttttgtttgattttttgattgtaatttcgtttagagtttttgtatttagaaattttaagatttaggattttgtataaatatatattttttgtttaaggttttgtgtgtttttttttgttttatgtggtttagtaggttgattttttttttatgttgagaaatagtatattttatttaaaaaaataataaatttgtttatgttaacgtttttgtttggaagtttttattggtttttttttataattaggagagtttcgatttttatgttttggagaaggggttttttataatttaattttttttttttttagttttattttttatttttagttttgttaggaaaggtagtgttatgttgttttaataaataattttaatatattagtggtttattttagtgaaagttggttatttttgttatatgatcgttgtaggttggtagggtagttttgtttattgtagttattaaagggtttaggttgaaggaggtttcgtgttgatatttttttttatagttattttgattgtggggaaggaattcggaatattatggttgttagagtatttatttatggtatatattatttttgtttatatattattggttaaagtagttatatggttatgtttttttagattattataattttattaggtgttttaaagggttttttaggaatatttggggaataatattaaagattttgtttttttttttgtttattaaatgtttggtttatttttttttttttggtggaatttttttattttttatttaagggaaataattttaaagatttatttagttatagtattaagttgttttgtttattgttttttatgatttttggatttgttttcggagagttttttttttttatagttaaagtaggtattggaaaatatgtttttaaataagtttttaaaagttggggagatgtagagtgatattaagttttgaatatgtgtaggtaggttttttatttatttgatatgaggtgttttatgtgataatagttataaagtttttttttagatatatttttttggtttgttatatttttttgtttttttgtttttttgtttgttgatttttttgttttttttttgtcgttttatttttttgttttttatttgattttgagtattttgggtttattgggttttgatgggagagttagatttttttttttttttttagagttattttgtttagttgaaagtatatattgggtaagattttaattgatttttttttttttttttttgagacggagttttatttttgttgttttggttggagtgtaatggtatagtttcggtttattgtaatttttatttttcgggtttaagcgatttttttgttttagttttttgagtagttgggattataggtatgcgttattacgttcggttaattttgtatttttaggagcgataggatttttttatattggttaggtttgtttcgaattttcgattttaggtgattcgtttttttcggttttttattttgaggttttaatagtaggtttatattttgtgatttgatttttattttaaagtttagttttttttaggtttttttttgttaaaagtattttttgattttatattttattagtcgggattgggaaataattgttttttttaacgatgtaaatttttggatttataggttttttttattttattttatttttgattgtaaataggttaaatttttttgagtttatttttgaatagtttgtagtaatttttagaatgtatttaatagttattaatatatattatttattttttgttttataatttttttttttagtttattaggtttatgatttgttttttatattattataggtgatatgtttattaaatagattattatttttttagtttttgatagtagtgtttttagttatcgttttttaaatgattgtttagttttattgttgttatgtttattgttgttattatattaatttatatttaggagttaatttttatatgagttaggatggtttaggttatgttgttataataaataattttaaaattttagtggtttaaaaataaattttatattttgtttatattatatgtttaattttacggggttttgtttaatgtgtttatttagaaatttagtttgaagaaggttttattttgatatatgttttaataattatcgtattagtttggtaggggaaagaaagtatggtgaatttatattggttttaaaagtttttttttaggaatgatattttttattgtatttatatattattggttaaaattagttatatggttatgttttatttaaagggtgtaggaaagtgtaattttattaggtattcggaagttaaagagttggaaatgtatatttttatatattttaggttatgttgtgttagttatttaaaaattttattgggttataattatagaattgttttttatttatattgtatgtttatttatatggtttggttgtgtttttatttaaattttattttgaattgtaataatttttatatgttaaaggtggggttaggtggagataattgaattatggggttagtttttttta

SEQ ID NO: 93 - DNA, 5928 bp, Artificial Sequence
  chemically treated genomic DNA (Homo sapiens)
gttgggataaatggaaggataggaatggggtgttttagagggttttttggttgggaggaggaaggagagggtaggaaagggtattgaggtggagtaatagaaaatgcgaagagaaagaaaaagggaggttaggcgtagtgatttaagtttgtaattttagtattttgggaggttgaggcgggtagattatgaggttaggtttaaggttagtttgattaatatcgtgaaatttcgtttttattaaaaatataaaaaattagtcgggcgtgttggtatatgtttgtaattttagttatttagggaggttgaggtaggagaatcgtttgaatttaggaggggaaggttgtagtgagttaagattaagttattgtattttagtttgggcgatagagcgagattttattttaaaaaaaagaagaaaggagtttttgggggtggtaaaggtagttttttatatttaggggttaggagaggttttttttatttagttttgaagattttttttttttttttatggaggagatagaataagatatagataagggatagataggttttagttagatggagaggattgacgacggttttaggggatatggttaggaagggttttttggagaaggtggtgggttttgaaggatgagtaggagttcgttaagagtgtaagggtattttaagttgagagaatttaaaattaaagaattgtagttatatttgggtaaataatataattatagaaagtatttattgattttttattatttgtttttttttttttttttttttttttttgagttggagttttattttgttgtttaggttggagtgtagtggcgcgatttcggtttattgtaattttttttttttgggtttaagtgatttttttgttttagttttttaagtagttgggattaaaggcgtgcgttattatatcgggagaatttttgtatttttagtagagataaggttttattatgttggttaggttggtttcgaacgtttgatttcgtgatttatttgttttagttttttaaagtgttgagattataggcgtgcgttattatatttagtttgattttttattatttttttaaatttaataaaaatcgtaatgttttttttttttgtattatcgtggtgtgtttttgattttatttttcgttatatttttttataagatttttaggattaagcgatttttggataagaaataaaagtaaaatcgttttattttttagtggatttggatgaaaattggaaataaaattaggtataattttaaaaggatattggagaagaattaagttgggtttataaggaattgtatatgagatggtatatatatttatgttgtttgaaggttacgattacgttagtatattaaattgaaagtgttattattatttggagagttcgacgtgtttttttttttgaatttgttatgaacgtgtgggttggttgggtttagtaataaatatgtgaggttttttattttaaaaaaaaaaatcgcgatattttataaagtaggtaggtttatttgtttaatttttatgaaggaaaagttgaggtttagagaggttgataggtttttgtattttatttgtttgtttgtaggaaagtgttttatttagtttaggttgttttagtttattatttattagattatttttttagttgttaaggttgaggtttaagtttagggtagggtttttgtaggtcgtttatttattttttgttttagggagaggtatgatttcgttttttttattttggttttattgtacgggatttagagaggggtttttagggtagggttggttataggtttgcgggttggattttgttttattagggatttttttgtttaggatagaatttgggttagagagtatagagatttatggatttgagtatgtatttgtgtgtatttgcgtttgtttatataatacgaatatagatagatataggtgtatatatagatatatattttaataggtagatagatatttttttaattaatttagagataaaataaatttatatttttagttttttgttttggtaatttgaattttaggtttgttaggttaggtttttattattattattattattattattattattattattattatttttaagatggagttttgttttgttgtttaggttggagtgtagtggtatgattttagtttattgtaatttttattttttgggtttaagtgatttttttttttttagagtagttgggattatcggtgcgttttttatgtttggttaatttttgtatttttagtagagatagggttttgttatattggttaggttggtttcgaatttttgattttagatgatttgttcgttttagttttttaaagtgtttattataggtgtgagttatttcgtttagtttattttttttttttttttttttttttttgagatagtgttttattttgtagtttaggttggagtgtaatggcgtaatttcggtttattgtaatttttatttttcgggtttaagcgatttttttgttttagtttttcgattagttgggattataggtatttgttattatatttggttaattttttttttttttttttttttttttttttttttgagacggagtttcgttttgttgtttaggttggagtgtagtggtgtgatttcggtttattgtaagttttgtttttcgggtttatgttatttttttgttttagtttttcgagtagttggggattataggcgttcgttattatgttcggttaatttttttttttattttttagtagagatagggttttatcgtgttaattaggatggttttgattttttgatttcgtgattagtttgttttggttttttaaagtgttgggatgataggcgtgagtttttgcgtttagtttaatttttatttttaatagagatggggttttattatgatggttaggttggttttaaatttttgattttaaatgtttgttttagatttttaaagtgttgggattataggtaggagttatcgcgtgtggtcgataggttattttttttggtgatgaggatagttttttttatggtttttatgttttagttgggggtagagttaggtgagtaaggaggatagaaaaggagtaacgtatgtttattggttaggtagataaattgaggttagagattatttatataagtaattttttgttgtatttatttttattttttatttttttttgagattggagttttattttgttttttaggttggagtgtagtggtataattttagtttattgtaatttttgtttttcgggtttaagcgatttttatgttttagttttttgagtagttgggattataggtgtatattattatattcggttaattttcgtatttttttttttttttgtatttttgtatttcggttagtttggttttgaattgttgattttaagtgatttgtttgtttcggttttttaaagtgttgggattataggtatgagttattatatttagtttcgtatttatttttaatattgagtatttattttatgcgaggttttgttagtaggtttagtataggtaatgtttttgatttttagggattatggtttattttattattttggtagatttagaggttataataaaggagtaaagtttgagggtggggtattttttgaagatatatttttgtattgggggaagggagtattaagtagagagtatagtacgtgtaaaggtttagaggtacgattagttttgtaattgggaggttaaggattagagagagtgaggggaaggaggttagggaaaggagggtgtgggttttatttagatagaggtggggagttggaggggtgtatgtagaggttgtaggttagatttagatgttttaaggattttttgtgagtattggtggggtgggtttatttttttttttttatattttttttttagttagttttaatagtggtttattaagttttaatagttatgatagtggtaataagtatgtaataattatattcggtatttttgttttattagtttagtttttggagttgggtattttcgtttaggatattatagttttggtagatttggggttaaaacgtgggcggcggaaggaaggggttgcgtaggggtttggatttttaggttttagggttttaagggtggataagagtttaggtttagttatagttcgggttttgttgtgatttttagttaattttcgggggatggttattttatttttttgagtttagttttttatttgtaaaggtaggaagtaggatttttggttttagaacgtatttagtgaaaatgattaggatttaagcgtttttagtaatttttggcgattttttttttttttttcgtttttttttgagtaattatacgcggggtggagggagggagggaaggaaggagggagggtgaggaacgtagatttttttatattttcggcgagttttcggatatagttttattaggtttttagtttcgtattcgtataaagtttttttagaaggcgcgttaggggaggttttggcggtatagtagagtaggaggcgttaaggagttatttagttatgcgggattttatttttttttagttttcggaggtcggtatcgttttcgttttcgttttcgttcggacggggttttacgcgcggatacggggcggggtttcggggcgggcgggcgtttggtggttcgggtttattacgttattcgggacgtgttttggcggaggcggcgtcggggagatcggtcgtatatagcggtttcggggcggggtgattcggttcgggcgcgcggtcgtttttatgacgttaatttataaggtagcgcgttgttgtggcgtttatcgcgcgtcgtcggggtaacggcggtcgggcgggcgtcggcggtttggtttcgtttttttatgtaaatgagcgacgttattcgtatttaatggcgaacggggcggtgagtttatcgcgtcgagtcgaggttataagagggcgtataagtggcgagtttcggcgagagtattatcgttgtcgtttatcgatatggataacgtaggagcgtattaaggcggagcgtaagcggttgcgtaatcgtatcgtacgtattataagtgtcgtaagcgtaagttggagcgtatttcgcgtttggaagagaaagtgaagatttttaagagttagaatacggagttggcgtttacggcgagtttgttgcgcgagtaggtggcgtagtttaagtagaaagtttttagttacgttaatagcggttgttagttgttgttttagtattaggtgttcgcgtattgagtttcgcgcgcggggcgtatgcgcggttattttttttaaggggcgggttcgcgggggggtgtcgtgggcgtttcggatttggagagggtgcggttttggggatttttttttttcgagtgtgtttaggaatttagagaggggcgcggttttcggggatttttttttttcgagggtgtttaggattcgataagttggattttttgttttcgggggggcgagcgtatgattttttcgttttcgcgttgtttttttttttcgcgcggtcgtttcgtgttgtataaattcgcgcgtttcggttgtttttttgtatatcgcgtcgcggaagggggtttcgagggggcgtagttttaaattttgttttttttttatttttattttttttttttttttttggaagagagaagaatagagtgttcgattttgttttatttatgtttttattcgggaataaacgttggttgtgtgtgtgtgtgtttttttgtgttggttttttaaagaaatgggaagaagaaaaaaaaatttttcgttttttttttcgatttcgttttttttttcggttttttcgatcggtttttttttttttttttgttttgttttgtt

SEQ ID NO: 94 - DNA, 5928 bp, Artificial Sequence
  chemically treated genomic DNA (Homo sapiens)
aataaaatagaataaaaaagggaggggggatcggtcgaaagaatcgaaggggggagcgagatcgaggaaaggggcggagaattttttttttttttttttatttttttaaaaaattaatataagaaaatatatatatatataattaacgtttgttttcgagtagaaatataaatagggtagaatcgaatattttgttttttttttttttaaagaaaaaaaaaaaaagtaaaagtaaaggaaaggtagggtttgaggttgcgttttttcggagttttttttcgcggcgcggtgtataaaggggtagtcgagacgcgcgggtttgtgtaatacggggcggtcgcgcgggggaaagaggtagcgcgagggcgggggggttatgcgttcgttttttcgggagtagggggtttagtttgtcgagttttgggtattttcggggggggggaattttcgggggtcgcgtttttttttgagtttttgggtatattcggggagggggggtttttagggtcgtattttttttaagttcggggcgtttacgatattttttcgcgagttcgttttttggggagggtggtcgcgtatgcgtttcgcgcgcgggatttagtacgcgggtatttggtgttggggtagtagttggtagtcgttgttgacgtggttgaggattttttgtttgagttgcgttatttgttcgcgtagtaggttcgtcgtggacgttagtttcgtgttttgatttttgagggtttttatttttttttttaggcgcgagatgcgttttagtttgcgtttgcggtatttgtgatgcgtgcgatgcggttgcgtagtcgtttgcgtttcgttttgatgcgtttttgcgttgtttatgtcgatgggcgataacggtggtgttttcgtcgaagttcgttatttgtgcgtttttttatagtttcggttcggcgcgatgagtttatcgtttcgttcgttattgggtgcgggtgacgtcgtttatttgtatggaggggcggggttaagtcgtcgacgttcgttcggtcgtcgttgtttcggcgacgcgcggtaaacgttataatagcgcgttgttttgtgggttgacgttatgggggcggtcgcgcgttcgggtcgggttatttcgtttcgggatcgttgtgtacgatcgattttttcggcgtcgttttcgttaaggtacgtttcgggtggcgtgatgggttcgggttattaggcgttcgttcgtttcgaggtttcgtttcgtgttcgcgcgtggggtttcgttcgggcgggggcgggggcgggggcggtgtcggttttcggggattggagggggatggggtttcgtatggttaaataattttttggcgttttttgttttgttgtgtcgttagggttttttttagcgcgttttttggagaggttttgtgcggatacggggttggaggtttggtggggttgtgttcgggggttcgtcgggggtgtggggaggtttgcgttttttattttttttttttttttttttttttttttttatttcgcgtgtgattgtttaggaagagacgggaggggagaggagggtcgttagaagttgttgaaagcgtttggattttgattatttttattgagtgcgttttagaattaggagttttattttttgtttttatagatgggaaattgggtttagagaggtggagtgattatttttcgagagttagttaggagttatagtagggttcgggttgtgattaggtttgagtttttgtttatttttagaattttagaatttgggagtttaggtttttgcgtagtttttttttttcgtcgtttacgttttaattttaggtttgttagggttgtgatgttttgggcgagggtgtttaattttaggggttgggttgatgaggtaggaatgtcgggtataattattatatgtttgttattattattatggttgttagggtttaatgagttattattaagattggttgggaagggggtgtgagggaggagagatggatttattttattaatatttataagggatttttaggatatttggatttgatttatagtttttgtatgtatttttttagttttttatttttgtttgaatggagtttatatttttttttttttgatttttttttttttattttttttgatttttggttttttagttgtaggattaatcgtatttttgggtttttgtacgtgttatgttttttgtttggtattttttttttttagtgtaaagatgtgtttttaggaagtgttttatttttagattttatttttttattgtagtttttgaatttgttagaatgatggagtggattatagtttttgaaggttagggatattgtttatgttgagtttgttgatagggtttcgtatagaatggatgtttagtattaaaggtgaatgcggggttgggtgtggtggtttatgtttgtaattttagtattttgggaggtcgaggtaggtagattatttgaggttagtagtttaagattagattggtcgaaatataaaaatataaaaaaaaaaaaaaatacgaaaattaatcgggtgtggtggtgtgtatttgtaattttagttatttaggaggttgagatatgagaatcgtttgaattcgggaggtagaggttgtagtgagttgagattgtgttattgtattttagtttgggagatagagtgagattttagttttaaaaaaaaataaaaaataaaggtgaatgtaataaaaggttgtttgtgtgggtggtttttagttttagtttgtttgtttggttagtgggtatgcgttattttttttttattttttttatttatttggttttgtttttaattggggtatgaaggttataagggaggttgtttttattattaagagaggtggtttgtcggttatacgcggtgatttttgtttgtaattttagtattttggaagtttgaggtaggtatttgaggttaggagtttgagattagtttgattattatggtgaaattttatttttattgaaaataaaaattaggttgggcgtagaggtttacgtttgttattttagtattttaggaggttaaggtaggttgattacgaggttaggagattaagattattttggttaatacggtgaaattttgtttttattgaaaaataaaaaaaaaaattagtcgggtatggtggcgggcgtttgtagtttttagttattcgggaggttgaggtaggagaatggtatgaattcgggaggtagagtttgtagtgagtcgagattatattattatattttagtttgggtaatagagcgagatttcgttttaaaaaaaaaaaagaaaaaagaaaagaaaaaaaaattagttaggtgtggtggtaggtgtttgtaattttagttagtcgggaggttgaggtaggagaatcgtttgaattcgggaggtggaggttgtagtgagtcgagattgcgttattgtattttagtttgggttatagagtgagatattgttttaaaaaaaaaaaagaagaaaaaaaaaataggttgggcgaggtggtttatatttgtaataagtattttgggaggttgaggcgggtaagttatttgaggttaggagttcgagattagtttggttaatatggtaaaattttgtttttattaaaaatataaaaattagttaggtatggggagcgtatcggtaattttagttgttttggagaaaggagaattatttgaatttaggagatggaggttgtagtgagttgaaattatgttattatattttagtttgggtaatagggtaagattttattttaaaaataataataataataataataataataataataataataataaagatttggtttggtaggtttgggatttaaattgttagggtagggaattggaggtgtgggtttgttttgtttttagattggttaggaaggtgtttgtttgtttattggagtgtgtgtttgtgtgtgtatttgtgtttgtttgtattcgtgttgtatagatagacgtaggtatatatagatatatatttagatttatgggtttttgtgttttttagtttaggttttattttggataaagagatttttagtgggataagatttagttcgtagatttgtagttagttttgttttgggaatttttttttgggtttcgtgtagtggggttagagtggaggagacggggttatgtttttttttgaggtaggaggtgagtgggcggtttatagaggttttgttttgaatttgggttttagttttggtagttggggagatggtttggtgaatggtaggttgagatagtttgagttgagtggagtatttttttgtaggtaggtaggtgagatatagaggtttgttaatttttttgagttttagttttttttttatgaaaattgagtaaataaatttatttattttgtggagtatcgcgatttttttttttgaaatgaaaggttttatatatttattattgaatttagttaatttatacgtttataatagatttagagaggaaaatacgtcgaattttttagatagtggtgatatttttagtttgatatgttaacgtgatcgtgatttttagatagtataaatatgtgtgttattttatgtgtaattttttatagatttagtttggtttttttttagtgtttttttggagttgtatttgattttatttttagtttttatttaaatttattggggaatgggacgattttgtttttgttttttgtttaggaatcgtttaattttgaaagttttgtaggaagatatggcgagaagtggagttaagaatatattacgatggtgtagaaaggaaaagtattgcgatttttattggatttgaagaaatagtaaggggttaggttgggtgtggtggcgtacgtttgtaattttagtattttgggaggttgaggtaggtggattacgaggttaggcgttcgagattagtttggttaatatagtgaaattttgtttttattaaaaatataaaaattttttcggtgtggtggcgtacgtttttagttttagttatttgggaggttgaggtaggagaattatttgaatttaggaggaggaggttgtagtgagtcgagatcgcgttattgtattttagtttgggtaatagagtgagattttaatttaaaaaaaaaaaaaaaagaaagaaaaaataaatagtaaggggttaataaatgttttttatgattgtattatttgtttaaatgtaattgtagttttttggttttgagtttttttagtttggaatatttttatatttttggcgaatttttatttattttttaaaatttattattttttttaagaaattttttttgattatgttttttaggatcgtcgttaattttttttatttggttaagatttgtttgttttttatttgtgttttgttttgttttttttatagaaggggaggggaggtttttaggattggatggggaaggttttttttggtttttaagtgtgggaagttgtttttgttatttttaagggtttttttttttttttttttgagatggagtttcgttttgtcgtttaggttggagtgtagtggtttgattttggtttattgtaattttttttttttgggtttaagcgatttttttgttttagtttttttaaatagttgggattataggtatgtgttaatacgttcggttaattttttgtatttttagtagagacggggttttacgatgttggttaggttggttttgagtttgattttatgatttgttcgttttagttttttaaagtgttgggattataggtttgagttattgcgtttggttttttttttttttttttttcgtattttttgttgttttattttaatgtttttttttatttttttttttttttttttagttagagagttttttgggatattttatttttgtttttttatttattttagt

SEQ ID NO: 95 - DNA, 11394 bp, Artificial Sequence
  chemically treated genomic DNA (Homo sapiens)
aataatttaattgtattataaatgtatgaaataatttttttgaagggggttgagggaaatgggtgttgattttagttattttggatatgagtggagtttgtgagattgaaggtaaaagatttgtatataagtattgtattgtagtgataaagttgtttttataaggtgtatggtttaataattttgaaattattatatatgtatattggaaatgaaagattaagttaagggatggtagatggtgggattttgggtttttatttttgaagtagaagtttatagataaataaggggagatagttagaatgatttaggtgggaatggattagagtggtaagatattagaatgaatttatgtttagtttatagatatatatatatatatatataatataaatgtgtatatatgtataaatatttataaatatgtgtatattaagggttagtatttatttatatatttatttgttttgttagttgagaaggtttagaaataatgatattttattagtaatgattgtatttagtgtttagagttttttggtttttaatattattttttaataaaggaattagagatttttggagaaatagttaattttaggtttagggtattttgtgttagaaagtaaggaagtatttagtaaaatataacgagagtatgttaaaaggatattatagttatttgaaagagtttttaatggttaaagtaggaataatttgagaaataaaataaagtagtatgagattataatttaaagtataaaataaatatttatgggtttatattgatatattttttattttatttatttattttttagataggttttattgtgttatttaggttagggtgtagtggtttattgtagttttggttttttgggtttaagtaatttttttgttttagttttttaagtatttgggattataggtgtatgttattatatatagttaaatttttaatttattatttgtagagcggggggttttgttatgttgtttaggtttattttgaatttttgggtttaagtgatttatttattttggttttttaaagtgttgttgataaattaataggggaggagagataaatttttgtgtagaattttatatagtttttgtagagaatttgtagttaaggaaatggagtataattttttattttttaaatttggtttaggaatagtgattttattttaaagagtatagtgtggaaaacgagaaaaaaaacgagtaagtttaggttgggcgtggtggtttacgtttgtaattttagtattttgggaggttaaggtgggtagattatttgaggttaggagttcgagattagtttggttaatatagtgaaattttatttttattaaaaatataaaaattagttaggtataatagtatgtagttgtagttttagttatttaggaggttgaggtaggggaattgtttgaatttgggaggtggaggttgtagtgagttgagattatattattatattttagtttgggttaatgagtgagattttattttaaaaaaaaaaaaaaaaaaaaaaaaggtttggtatagtggtttacgtttgtaattttagtattttgggaggttaaggtgggtagattatttgaggttaggagtttaagattagtttggttaatatggtgaaatttcgtttttattaaaaatataaaataagtcgggcgtggtggtttatgtttgtaattttagttattcgggaggttgaggtaggagaatcgtttgaatttaggaggcggaggttgtagtgtgtcgagattgagttattgtattttagtttgggtaataagagtgaaattttgttttaaaaaaaaaagtaagtttatagtggagaaatttgataaatattatttagatttttaaagtttaattttttaattatggttgtaattttaatttggaacgttttatttgtgtggtattgttatattaagaaataagaaatgttaggtgatcgagatgaatattaataatgatagtttatgttgataatacgtattttggatatgatgttatgagaatgatattttatttatgtggttttttatttttaaatttataattttagtttaattatgagaaaaatattagataaattttagttgagggatattttataaaatatttgtttggtattttttaaattgtcgaggttattaaaaataaggaaagtttgagaatttattatagttaagaggagtttaaggagatatatagattaaatgttagggtggtttttaggtgtgtttgttgtttttggggtagaatgttaaggtggggtgggggtattaatagatatttatgtatagtttagggaagtatttttatgagtgtagttatgatttttattaaagtttttggttttttgtgatgttagggtttgtattttttgatttgattgtataatatagataaaatgttttaggttgggattgtatttatggttaggaaattaggtttttgaaatagatttgaattgatattttattttgttattttatttgttattttgggaagattattaaaatttttttgtgtttttttttttattatttttaatatagggattataattgtaattattaataattggttaattttttttttttttttttgtttgtaaaggataaataaagtatgtagggtgtttcgtttagtatttggtatttagtatttagtaaatgttagttatttattattgtatattgtgtaatttatttagtgtatgtattttttttttttgttgttttgtttgtgtatttgtttttgagatagagtgttgtttagttatttaggttagagtatagtggtgtgattttagtttattgtaatttttgttttttaggtttaagggatttttttattttagtttttttggtagttgggattataggtgtttattattatgtttagattatttttgtatttttattagagatagggttttattatgttggttaggttggtttggaatttttgattttaggtgatttatttgtttcggttttttaaagtgttgggattataggcgtgagtcgttatatttggttgtgtgtgtgttttttgtttttgtttttgttttttttgttgttgttgttttgatggagttttatttttgttgtttaggttggagtgtaatggcgagatttcggtttatcgttatttttgttttttgggtttaagcgagttttttggtttagttttttgagtggttgggattataggtatacgttattacgttgggttaattttgtatttttagtagagacggtgtttttttatgttggttaggttggttttgaatttttaattttaggtgattcgtttgtttcggttttttaaaagtgttgagattataggtatgagttattatgtttagttcggttggttttttgatagaattttatttaggaaaattgttttttttttttttttttgtgtaaaaaaaaaaaaaaaagagaggaagaagggaggaaggaaggaaggaaggagagaaagaaagagagagaaagaagaaaagagaaagaaaaaagaaaagaaagaaagagaaggaaggaaggaaagaaagaagaaagaaattgttaattgggtgttggaaaattgaaaagataaaaggggtttaattattggatgtatttattgtaggtagtagttattatattatatggaaaatttaaaggagaggttgagtttaaaaataattttttaattggtcgggttcgggggtttatgtttgtaattttagtattttgggaggttgaggcggttggattatttgaatttaggagatacggcgaaattcggtatttattaaaaaatataaaaattagtcgggcgtggtggcgcgtgtttgtaattttagttattttggaggttgaggtaggagaattttttgaattcgggaggcggaggttgtagtgagttgagatcgtattattttaggttgtattttagtttgggtgatagggcgagattttgtttgtaattagtaataataataataaaattaatagttttattgagtataatttatatgttataaaatttatttattggaagtttatattttttttattttatagggttttattttgtcgtttaggttgggatgtagtggcgttatgtcggtttattgtaatttttgtttttcggggttaggtgatttttttattttagttttttaagtagtcggattataggtgtgtattattatatttagttaatttttttttttttttttttttttttttttttttttttttttttttttttttttttttttttttgtagatacggtgtttttttatgtggttaggttggttataatttttgaatttaagtgattcgcgcgtttcgattttttaaagtgttgggattataggcgtgagttattgcgttcggttatatttttatgattttttaataaatttatatagttgtataattgttattataatttatttttagaatatttttattatcgtttttttttaatttttttaagtttatttgtatttaatattcgtttttatatttcgttttaggtaattgtgttttttgtttttgtagatttgtttagtgtaatttattttttatttcggtaatataagtaggtcgtgtaaaatagagattatttagtaatagattaggtagatttaaattcgatggaaagtttaaagttgtttaaaagtgggttatagttttatatgatttttttaaaaagaggaaaggtgagaagaggttttagtttggggcggttaggattggggtgatggttttggaggcggcgagggaaggtgtgaggcgaggagatttttcgaatcgcgttcgtttcgtttagggtcggattggtttttaatttattttttttgttttagggcggtcgtcgtttttttgcgtaggcgtagtgtttttgttttttggtcgagggcgggcgagcggagtttgttttcgtagcgatcgcgagcgtgtggcgattgtttttgtttgttatttagatatggaagttgaggggatgtatagaggtagttagaatttaggttagggtttcgttcggtgttgatcgttttcggggtcgagtaggcgatgggggagttcggttttttcgttataggagatcgcgtcggtggtcggagttggtgtttgcggcgggtggggatgagcgtcgggtggttgttgttggaagatgggtgcgaggtacgggggaaggggttttgtggagcggagggtaggggttggagggagcggggtttcggggagggaggaaggtgttttgttgggttgaatgaatggtagagaggaggcgggtattaggaagaggagcgaagtgtttgtggggggggtggatttttggggagagaagggagaaagcggttttggcgcgagcggttgaagggtttgcggtgggaggtgtttgggggagaaataggggtcgagtgggagaaaggaagaaaagagagttcggttttggggagttcgggggggttataagggttggggcgaggacggaggttttgattcgcggtttgtggggcgagaagcgggtttcgtttagagaggtttgggttagcgggtagttgggtcggggattgggaggagagggacgcgtagggaacgtgaggagatgcgggggtgtcgaggaggggagggcgggggttggttagatttcgtttagggcgtatagagtttcgcggtgttaggtcggggaacggtggcgggggtcgcgagttgtcgggaagtcgaggtagggttcggcgtttgaattttttcgagtttgttttgaaaacgattgtaaattttgggttttgttttttaaagtaattaaatttttacgtagaaatgttttttttttttttaattttgaggaatatgggcggtttgggttgggttatattttttttgtgaggttcggtacggtcgagtggtattttttgaggtgggtcgggtaggtatttagagttttttttagaggttgtttgtcgtttttattaatgtagttgtaaatgaaaaatattttaaggggaaagatgaggtatcgtttttggtacggtttaagatgtattagcgtggtgtattttgaaaagacgagggaagggaggagggagttagattgtaattaggttgagaaggagaattgggttagggataagtttgtgatgattgggaattatttgggttttggaaataatttgtatgaaaagttttttttgtagtaaaagtggatggttggttatgatgtaaatttaagaagtattttgagttttatgtgtgtttaggtagattttttttataagtcgtattgttttaatttagtttgttaggtatttattgagtatttaatattgtttggtgtataatgaggataaataaaatttttgcgttcgaagagtttaaggtttgagtggggagagaggatttatataatgaagtagttatcgtataaagaatatttatatgggttgtatgattaagtgttaagatttggattatttagtttttttttagagtagtagttttttaagttagaggaggaatttatgtttaggtataaatttaattgttagattagggagtgttataaagggttatttgtatgttgtggtttgaggaatattaagaaaatatttttgtttttaaatattttttttatttaggtattagtgtttaaaagtttatattaagtatttatttttttagtttgagtattgatttttttttgtttggttttttttaatagtatatgtttgtgggaagtttaataaattaaaatacgaatatttgaataataatttgaataatatatataaaaataaattatttttgtgtataattattagttaattttatatatattatttaatttgatttttgtatatatataattttataagataatttagtgggtaagtgttatttttttagatttaattgttgtggattaatttatgatttttgaatagtttgttagtattgtagttttgggtaggtgggatggggaggacgaattaaagtatttgaagaaagggtaagaagattataaagtagttttagatatattttaaattatttgatagttttttatggggttagttgtatggggagggatttatataaatttagtggtaagattgtggttggttttagggatttgtgtgtaggagaagtttgttaggtttggttgtttgtaaggttaggtcgtagtatagtttgaaaagaagtttgaattaaaggtaagagaagaagttgtatttattgttatggtttttaaattatagtataagttgttttgtataagattttaaaagatacgttaataatataatagtaaaggtaggttagttttttgtttttttagtttttagttttagatgttgtggataaaataataaaatagggttttttttattttattgatgggaatattgtagtaaattgtttaattaagtggttttaagtttgttaaagtaatgtatagagtttggtggaaaaataagtagagatttattgtaaattagttagtttttaggtattataaagtatttaggtttttggggaaaataatagaattttttttttttttttttttttttgtatttagtttttattaagttttttgttttaagggaaaaaagggaaaggatggttatatttattggtttgggggtttttttgtggggtgttttgttttgagatagagtattttttttgttatttaggttggagtgtagtggtgtgattatatttttatttttttggtttaagtggtttttttgttttagttttcgaagtagttgggattatagatatgtattattatgtttagttattttttgtgtttttaatagaggtggggtttcgttatgttggttaggttggtttcgaatttttggttttatgtgattcgttcgtttgggttttttaaagtgttggaattataggtgtgagttattatatttggttagatttatttgttatttgagaaatagtaggaattgtgtttaggaggaaagagatagttttagtgaaggtgggtaaagataggatgattttttagattaataatgtgtgtaagtttaaaggtttgtaaaattattgtaaatgaaaataattttttatatatgggtcgttagttagtttttacgggaaatttagtgttatgttgagtggttttgagatttttaggtaattttattgtattttttaattatagtataggtgaaatattagtagtattaaggtaaattttaagattaggtagtgtagggaaggatgtaaaagaatgatttttttttttgggtttagagtttgttggaggtaatgttaggaaaaggtatttttttattgttttggtattgtttttttttggttatttataatggtagtttggttgtttttttttaagtattagtatgtaatatgagatgtttttttttttagagataaagttatttaaatagaaattttattgaatatggacgatagataaatttttagttattttatttttaatagatatgtgtatttagaggaatttttataattaatataattttggtagagtgtgaaagaattgaaaaattttgtgtttagtgttggtggagtgattattataatattttaaagagaaataagtgagattgtatgagttttaattgttgttttatattttttaatggtaatatagtttttaatttttgatttaaaaatatttattttaaaattttgaggatttatatgtaagatttttttatttttttatttatttttaaatatttaattgaatattatgttaggtatagaaatatagtggtaaataagatagataaagtttttgtttatttaatttatattttattacggggatagaggggaaaagtaaaataaataagataattttggtttgtgataagtattttttaataattgaagaaatatgatgggaagtagataattaattttagatagaggtaattagagtaggtttatgagtagttggaatatgaaagataaggagtttgtgtaagatttgagagaagagtgtttttagtagaggggttaagtgaaaagatttttaggtaggttggtatttcggggagatgggtttaaggaataataataataaaaaagtttgaggggttggagtagttagtgttggtattatggtatgagttaagattaaagagtagaagggtttaggatatttagggttttataggttatggaaggaagtttgaatgattggatagttttaaggaaagaaggaaaatgatttgatttaaaatttttatatttttattttagttattattataaagtttatgggggttagagtgagaatagaaatagtaggaggttaggtggtttggattaaggttgtggttgtagagataggaatgaatagatttaggatatatttgaattatagtttatataatttattagtgattttaatgtggggatgagggatagagatgaattaaagatggtttttgggttatgggttgagtagttggttggatagtattgtgaatattgagataagagtttgtggggaggaatagattaggttagtgagtcgtggtggtttttgagggattgaggaggataggtattttgaaagattttaaagagaagagaagagggtagttttagttaattttggtttaaagtttttagttaaggttgtgatatgggatattaaagaggtcgtttgtgtattaagaagaatatgtagggagtcgggcgcggtggtttatatttgtaattttagtattgtgggaggttgaggtaggtagattatttgagattaggagttcgagattagtttgattaatatggtgaaatttcgtttttattaaaaatataaaaattagttgggtgtggtggtgcgtgtttgtaattttagttacgtggaagttgaggtaggagaattgtttgaattcgggaggtagaggttgtagtgagttaagatcgtgttattgtattttagtttgggtgataaagtaagatttttttaaaaaaataaaaaaaaattaataaataaaaaagaataagggaattttgtgatttggaatttagaagaattttattttttttttttatagggttgttatgaattagattggtttaataggaaagtatgatagatgtgaattggggtttttttttaatttttttcggaagtttttaagttgtttttgtggataagatagagaatatgtattttaatgtaaagatttttggttgaattataattggttgaaggtatatttagatggtgtgggttaatgtttattaggtttttttgaaaattttgtttttggttgtattttattttgtgttttgaacgaaggtatagaaggtattattttataaatttggtggaagagatattaagtatgtttgatttgatggtagattaaaaatttagaaaggttttgataaattggtttgataggttgaattagtaagatgaaatttaataggaattaatttaaggttttgcgtttgaatttaaggttttttatttagttaagtatagagtagaagagataggatttaggatagtattttttggaggagggggagattaagaaatttaattatttttaagttcgaggatatattggtagtgtattagatttgttatgaaagttaatgtaatttatatgttttagtgataatatttagaattgggaaagtaatatttgcgtttgattgtgtaatagaaattaagtttattttttttaatatgttatttaggaataaagataaattagtagtttttttatagatttattagaatggtaaaggtttaagtttattttttgggagttaagttgaagtaattgggaatatagaattaggaaaagagaaaatttagtgtttattttatatttgtgttattgaaaggggattggagatttttcgatggtgtttagggtaaagttagggttaatggatggaatttataaggagaaaaatgttaagttagagatattttaaaaattggagggtttgttttatgtaaagttattgatagtatttatgcgttgatgggatgtgtagaaagaatttttttattttatagttattgaattagatgattttttaagattttggtaattttgagatatatggataatttttttttagtttttttttgttgttataatcgtttgtttttttttatttggtggtttttaagatagttgaagaggagatagttgatgtattgttttggttttataggtgtttggttttttaagttaggatttgtatatgttgttggttgatgagatttgtaaaggatttttttttttagtataatgattgatggtattttttgtattgttgttgttttttagg

SEQ ID NO: 96 - DNA, 11394 bp, Artificial Sequence
  chemically treated genomic DNA (Homo sapiens)
tttgggagataataataatgtaagaaatattattagttattgtgttgaaaagggaggttttttataaattttattaattagtagtatatgtaggttttgatttaagaaattagatatttgtggaattaaaatagtgtattagttattttttttttagttgttttgagaattattaagtagaaaaaggtaaacggttgtgataataagagaaagttgaaaaagagttatttatgtattttagggttgttaagattttgaaaggttatttggtttaatgattatgagatagaggaattttttttatatattttattaacgtataaatattgttagtaattttatataaggtaggttttttaatttttaaaatgtttttgatttggtatttttttttttgtaaattttatttattggttttggttttgttttgggtattatcgggaaatttttaatttttttttaatggtatagatataaagtgaatattgagttttttttttttttggttttgtatttttagttattttaatttaatttttaggggatgggtttgagtttttgttattttaatgagtttgtgaagggattgttggtttatttttatttttggatggtatattaagaaaaataaatttaatttttattatatagttaaacgtaagtgttatttttttagttttagatattattattggagtatataaattgtattagtttttatagtagatttagtatattgttagtgtattttcgaatttaggaatgattaaattttttggttttttttttttttaagaaatgttattttaagttttgttttttttgttttatatttgattggatggaaaattttggatttaagcgtaggattttagattgatttttattaaattttattttgttagtttagtttattaaattaatttgttaagatttttttgaatttttaatttgttattagattagatatatttaatattttttttattaaatttatgagatgatgttttttatattttcgtttaagatatagaatgggatgtagttaaaggtaaagtttttaggaaaatttagtaaatattaatttatattatttggatatatttttagttagttataatttaattaaaagtttttgtattggagtatatattttttgttttatttataagaatagtttgagagttttcggaaaaggttgaaaagaagttttagtttatatttattatatttttttgttggattagtttagtttataataattttgtgaaggaaggaaatgaaatttttttgagttttagattatagaatttttttatttttttttgtttgttaatttttttttgtttttttgagagagttttgttttattatttaggttggagtgtagtggtacgattttagtttattgtaatttttgtttttcgggtttaagtaatttttttgttttagtttttacgtagttgggattataggtacgtattattatatttaattaatttttgtatttttagtagagacggggttttattatgttggttaggttggtttcgaatttttgattttaagtgatttgtttgttttagttttttatagtgttgggattataggtgtgagttatcgcgttcggttttttgtatattttttttagtgtataaacgatttttttaatgttttatattataattttaattgggaattttaaattaaagttagttaaaattgttttttttttttttttttaaaattttttagaatgtttgttttttttagttttttaaagattattacgatttattgatttaatttatttttttttataaatttttattttagtatttataatattatttaattaattatttaatttataatttagaagttatttttgatttatttttgttttttatttttatattgaaattattggtaaattatatgggttataatttaaatatgttttaagtttgtttatttttatttttgtagttatagttttagtttaaattatttggttttttattgtttttgtttttattttagtttttataagttttataatagtaattggaatagaaatgtaaaaattttaaattaggttattttttttttttttttaaaattgtttaattatttaaatttttttttatggtttataagattttgaatgttttgagtttttttattttttagttttaatttatattatagtgttaatattagttgttttagttttttaaatttttttgttgttgttgttttttaagtttattttttcgaagtgttagtttatttgagggtttttttatttagtttttttgttaagaatattttttttttagattttgtataggttttttattttttatgttttagttatttataagtttattttgattatttttgtttaaagttggttgtttgttttttattatatttttttagttattaggaagtatttattatagattaaaattattttgtttattttattttttttttttgttttcgtaatagaatataaattagataagtagggattttatttgttttgtttattattgtgtttttatatttggtatagtgtttagttaagtatttgagaatgaatgaaagaataaagaggttttgtatatgagtttttaagattttagggtgggtgtttttaggttagaagttagagattgtattattattggaaaatatggagtagtagttggaatttatatagttttatttgtttttttttaaaatgttgtggtgattattttattaatattgagtataaagttttttagtttttttatattttgttagaattatattaattatagaagtttttttgaatatatatatttgttaaaaatggaatggttagggatttatttgtcgtttatatttagtaaaatttttatttaggtagttttatttttaagagaggaagtattttatattatatgttaatatttgaggggagatagttagattgttattgtgagtagttaggggaaaatagtattaaaatagtagaagagtgtttttttttgatattgtttttaatagattttgaatttagaaaaaggaattatttttttatatttttttttgtattgtttggttttagaatttattttggtattattgatattttatttatattgtagttaaagagtgtagtgaggttatttggaaattttaggattatttaatataatattgaatttttcgtgggaattgattgacgatttatatgtgaggggttgtttttatttataatagttttgtaagtttttgagtttatatatattattgatttaaaagattattttgtttttgtttatttttattaagattatttttttttttttgggtataatttttattgttttttaaataataagtaaatttggttaggtgtggtggtttatatttgtaattttagtattttgggaagtttaggcgggcggattatatgaggttaggagttcgagattagtttggttaatatggcgaaattttatttttattgaaaatataaaaagtaattgggtatagtggtgtatatttgtaattttagttatttcggaggttgagatagaagaattatttgaattagggaggtgaaggtgtgattatattattgtattttagtttgggtgatagaaggagtattttgttttaaaataaaatattttataaaaaagtttttaaattagtaaatataattattttttttttttttttttttggggtagaaaatttaatgaaaattaaatataagagaagaaaaggggagagaaggttttgttgttttttttaaaggtttagatattttatagtatttgagaattagttaatttgtaataaatttttatttgtttttttattaaattttatgtattgttttaataagtttaaagttatttaattagataatttattatagtgtttttattaatgaaatgaaaggaattttgttttattattttatttataatatttgagattaagaattggaaaggtagggaattgatttatttttgttgttatgttattagcgtattttttaaaattttgtgtaaaatagtttgtgttatgatttggggattataataataagtataatttttttttttgtttttgatttagatttttttttaggttatgttacgatttgattttgtaggtagttaagtttggtaggttttttttatatataggtttttgaagttagttatagttttattattgagtttatatgggtttttttttatgtaattggttttataaagaattattaaatggtttagaatatgtttaagattgttttatagtttttttgttttttttttaggtgttttaattcgttttttttattttatttgtttaagattgtagtattgataagttatttagaagttataaattaatttataataattgaatttaaaggaataatatttgtttattgagttattttatgaggttgtgtgtatgtagggattagattaagtaatgtatgtgaaattaattaatagttatgtataaaaataatttatttttgtgtgtattatttaggttattatttaggtgttcgtgttttaatttgttaaattttttataaatatatgttgttggaaagggttaggtagggaaagattagtgtttaagttaaaagaatgaatgtttaatgtggatttttaggtattaatatttggatagaagaggtatttggaggtagagatgtttttttggtgttttttaaattatagtatataagtaattttttataatattttttaatttagtaattaaatttgtgtttagatatgaattttttttttgatttgaagaattattgttttgggaaggaattaaataatttaaattttagtatttgattatatagtttatatggatgttttttatacgatgattgttttattgtataaattttttttttttatttaagttttaaatttttcgagcgtagaaattttatttgtttttattgtatattaaataatgttaaatatttagtaaatatttggtagattgaattgaggtagtacggtttataggaaaaatttatttgaatatatatgagatttaaaatattttttgaatttatattatgattaattatttatttttattgtaaagagaattttttatatagattatttttaaaatttaaatggtttttagttattataagtttgtttttgatttagtttttttttttaatttgattgtaatttaattttttttttttttttttcgtttttttaagatgtattacgttggtgtattttgaatcgtgttaggaacggtattttatttttttttttaaaatattttttatttgtaattgtattaataaagacgataggtagtttttggagagaattttgaatatttgttcgatttattttagggagtgttattcggtcgtatcgagttttataggagaaatgtggtttagtttaagtcgtttatgttttttagagttgggaaggaggaagatatttttacgtgaaagtttgattgttttaagggataaaatttaaaatttgtaatcgtttttaaaataaattcgagaaagtttaggcgtcgggttttgtttcggtttttcggtagttcgcggttttcgttatcgtttttcgatttggtatcgcggggttttgtgcgttttaaacgggatttggttagttttcgttttttttttttcgatattttcgtatttttttacgttttttgcgcgtttttttttttttagttttcggtttagttattcgttgatttaggtttttttggacggggttcgtttttcgttttataggtcgcgggttagggttttcgttttcgttttaatttttgtggttttttcgggttttttagagtcgaattttttttttttttttttttttattcggtttttattttttttttaaatattttttatcgtagattttttagtcgttcgcgttagaatcgtttttttttttttttttttaggaatttattttttttatagatatttcgtttttttttttgatgttcgttttttttttgttatttatttagtttagtaagatattttttttttttttcggagtttcgttttttttagtttttgtttttcgttttataggattttttttttcgtatttcgtatttattttttagtagtagttattcggcgtttatttttattcgtcgtaggtattagtttcggttatcggcgcggttttttgtgacgaagaagtcgggtttttttatcgtttattcgatttcgggggcggttagtatcgagcgagattttgatttaggttttggttgtttttgtgtatttttttagtttttatatttaaataatagatagaagtaatcgttatacgttcgcgatcgttgcgaaagtaggtttcgttcgttcgttttcggttaggaagtaggagtattacgtttgcgtaagaggacggcggtcgttttggagtaaagagggtgggttgggagttaattcggttttgggcggggcgggcgcgattcgagaggttttttcgttttatattttttttcgtcgtttttagaattattattttagttttagtcgttttagattggaatttttttttattttttttttttttaaaaaagttatgtgaaattatagtttatttttaaataattttaaattttttatcggatttaagtttgtttagtttgttgttaaatagtttttattttgtacgatttatttatattatcgaagtaaaaaataaattatattaggtaaatttataaagataaagagtatagttatttggggcgaggtgtgggagcgggtattgaatgtagatgggtttgaaaaaattggaggaaagcggtaatagaaatgttttaaaagtggattgtggtgataattgtataattgtataagtttattaaaaagttatggaagtgtggtcggacgtagtggtttacgtttgtaattttagtattttgggaggtcgagacgcgcggattatttgagtttaggagttgtgattaatttggttatatggggagatatcgtatttataaaaaaaaaaaaaaaaaaaggaggaagggagggagagaaaggaaaaaagaaaaaaaagaaaaattagttaggtgtggtggtgtatatttgtagttcggttatttgggaggttgaggtgggaggattatttgatttcgggaggtagaggttgtagtgagtcgatatggcgttattgtattttagtttgggcgatagagtgagattttgtaaagtgaagaaagtgtaaatttttagtgggtgaattttatggtatgtaaattatatttaataaagttgttaattttattattattattattgattatagatagggtttcgttttgttatttaggttggagtgtagtttggagtggtgcgattttagtttattgtaattttcgtttttcgggtttaagagatttttttgttttagtttttagagtagttgggattataggtacgcgttattacgttcggttaatttttatattttttggtagatatcgggtttcgtcgtgttttttggatttaagtgatttaatcgttttagttttttaaagtgttgagattataagtatgagttttcgagttcggttaattaaaaaattgtttttaaatttagttttttttttggattttttatatagtgtgatagttgttgtttgtagtgagtatatttaatggttgagttttttttgtttttttagttttttaatatttagttaataatttttttttttttttttttttttttttttttttttttttttttttttttttttttttttttttttttttttttttttttttttttttttttttttttttttttttttttttttttttttttttttttttttttttttgtataaggggaaagaaggaaaataatttttttaaataaaattttgttaaaaaattagtcgggttgggtatggtggtttatgtttgtaattttagtatttttgagaggtcgaggtaggcggattatttaaggttgggagtttaagattagtttgattaatatggagaaatatcgtttttattaaaaatataaagttagtttagcgtggtggcgtgtgtttgtaattttagttatttaggaggttgagttaggagattcgtttgaatttaggaggtagaggtggcggtgagtcgagatttcgttattgtattttagtttggataataagagtgaaattttattaaaataataataataaaaaaaataaaaataaaaataaaaaatatatatatagttaagtgtggcggtttacgtttgtaattttagtattttgggaggtcgaggtaggtggattatttgaggttaggggttttagattagtttggttaatatggtgaaattttgtttttagtaaaaatataaaaatgatttgggtatggtggtgagtatttgtaattttagttattagggaggttgaggtgggaggattttttgagtttgggaggtagaagttgtagtgagttgagattatattattgtattttagtttgggtgattgagtaatattttgttttaaaaataaatatataaataaaataataagaaaagaaaatatatatattaaatgaattatatagtgtataatagtaaatagttaatatttattgagtgttaagtgttaggtattaggcgaagtattttatatattttatttgttttttgtaaatagaaagaaaaaagaaaaattagttagttattagtggttataattataatttttatgttagagatgatgagaaaagaggtatagagaggttttggtaatttttttaaagtaataaatgaaatggtagagtaggatgttaatttaagtttgttttaaaagtttagttttttaattatgggtgtaattttaatttggaatattttatttgtgttgtgtagttagattaagaaatgtaggttttgatattatagagggttaggaattttggtgaaagttatagttgtatttatggagatgtttttttaagttgtgtataggtatttgttggtgtttttattttattttagtattttattttaggaatagtaagtatatttagaagttattttgatatttagtttgtgtgtttttttaggttttttttggttgtgatagatttttagattttttttgtttttgatgatttcgataatttgaggagtattagatagatattttgtagaatgttttttaattgggatttgtttgatgttttttttatgattagattggggttatggatttggggatggaagattatataggtaaagtgttatttttatggtattatatttagggtacgtgttattaatatgaattattattgttggtgtttatttcgattatttggtattttttattttttgatatgatagtattatatagataaaacgttttaggttgggattgtaattatggttaggaaattaggttttggaaatttaggtagtgtttgttaggtttttttattgtaaatttatttttttttttgagatagagttttatttttgttgtttaggttggagtgtaatggtttaatttcgatatattgtaattttcgttttttgggtttaagcgatttttttgttttaatttttcgagtagttgggattataggtatgagttattacgttcggtttattttgtatttttagtagagacggggttttattatgttggttaggttggttttgaatttttgattttagatgatttgtttattttggttttttaaagtgttgggattataggcgtgaattattgtgttaggttttttttttttttttttttttttttgagatggagttttatttattggtttaggttggagtgtaatggtgtaattttagtttattgtaatttttattttttaggtttaagtaatttttttgttttagttttttgagtagttgggattatagttgtatgttattatgtttggttaatttttgtatttttagtagggatagggttttattatgttggttaggttggtttcgaatttttgattttaggtgatttgtttattttggttttttaaagtgttgggattataggcgtaagttattacgtttagtttaaatttattcgttttttttttcgttttttatattgtattttttggaatgaagttattatttttgggttaaatttaaggagtgaggaattatgttttatttttttaattgtaggttttttatagaaattgtatggaattttgtataggagtttgtttttttttttttgttgatttattaatagtattttgggaggttaagatggatggattatttgagtttaggagtttaagatgggtttgggtaatatagtaagatttttcgttttataaataataaattaaaaatttagttgtgtgtggtggtatgtatttgtggttttagatatttgggaggttgaggtaggaggattgtttgagtttaagaggttaaggttgtagtgagttattgtattttagtttgggtgatatagtgagatttgtttgaaaaataaataagtaaaatgaaaaatatattagtgtgaatttatggatatttattttatattttgggttataattttatattgttttattttgttttttagattgtttttattttggttattgagagtttttttaggtggttatggtgtttttttgatatattttcgttgtgttttgttaagtatttttttattttttggtataagatattttagatttagaattagttatttttttaaggatttttggtttttttattggaaaatggtattagaaattaagaaattttgggtattaggtgtagttattgttagtgggatgttattgtttttaggtttttttagttgatagagtaaataaatatatgggtgaatattaatttttgatatatatatatttataaatatttatgtatatatatatatttgtgttgtgtgtgtgtgtgtgtgtatttgtaagttaggtatgagtttattttgatgttttattattttaatttatttttatttgaattattttagttatttttttttgtttatttgtaaatttttattttaaaagtgagaatttagaattttattatttgttattttttgatttaattttttatttttagtatatatgtatagtgattttagaattgttaagttatatattttatggagataattttattattatagtatagtatttgtatgtaggttttttgtttttagttttatagattttatttatgtttaaagtggttgaggttagtatttattttttttaattttttttagagaggttgttttatatatttgtaatatagttagattgtt

SEQ ID NO: 97 - DNA, 5377 bp, Artificial Sequence
  chemically treated genomic DNA (Homo sapiens)
aagtttaaaattaaggtattagtagggttggttttttttggaggtttcgagggagaattttttttttttttttttttagatggagttttattttgttgtttaggttggagtgtagtgagtgtaatttcggtttattgtagtttttgttttttaggtttaagcgatttttttattttaatttttcgagtaattgggattataggtatgcgttattatgtttagttaatttttgtattttttgtagcgagggggttttattttgttatttaggttggttttaaatttttgggttttagtaatatttttgtttcggttttttaaaatgttggaattatagacgtgagttattatatttagttatttgagaaagaatttgtttttttggttaggtgtagtggtttaagtttgtaattttagtattttgggaggttgaggtaggtagattatttgaggttagaagtttaaaattagtttggttaataggatgaagttttatttttattaaaaatataaaaattaatcgggtatggtggtatgtatttgtaattttagttatttgggaggttgaggtataagaattgtttgaatttaaggggtggaggttgtagtgagttaagattacgttattgtattttagtttgggttatagagggagattttatttaaaaaaaaaaaaaaagaaataaaaagaatttttttttagttttgttgttggtggtttcggagatatttttgggtttgtggttgttttattttaatttttggttatttttatatgttttttttttttgtgtttgtgtttttgcgtttttttttttttaaggatttttgtcgttggattagggtatattttaatttaggatggttttattttaagacgttttatgatgtttgtagagaaattttttttgtttttgagatagttttattttgtcgtttaggttggagtgtaagggtgcgatttcggtttattgtaatttttatttttcggatttaagtgatttttttgttttagttttttaagtagttgggattataggcgtaagttatcgtgtttggttaattttatatttttagtagagacggggtttttatgttagttaggttggttttgaatatttgattttaggtgatttatttgtttcggttttttaaagtgtttggattataggcgtgagttattgtgtttagttaaagaaattttttttaaataaggttatagttataggtgttagggattgagatttagatatttttttgtggggttattatttaatttattatttatggattgaattatttatggtaagattttgtttttataaataaaaattagttaggtataatggtgtatatttgtagttttagttgtttgggaggttgagttgggaggatggtttgagtttaggagtttgaggttatagtgagttatgatcgcgttattgtattttagtttggatgatagagtaagattttgtgttaagataaataaataaataaattatggattattattattattagttaataataatatatttttttttgtttagtaattgttataaatgtattatattaatgtaagatgataataggagaaaggttggggtggtgcgaggggtgttatttgggaacgtcgtgtatttcgtgtttaatttttttgtaaatttaaaattgttgtagaaaataaaagtttagattaggcgttgtgagttacgttttttaaattttagtattttgggaggttaaggcgggcggattatttgaggttaggagtttgagattagtttggttaatatggtgaaattttgtttttattaaaataaaataaataaataaataaaaattagttgggtatggtggcgggtgtttgtaattttagttatttaggaggttgaggtaggagaatttttggaattcgggaggcggaagttgtagtgagttaagattgagttattgtattttagtttgggtaatagagtaagattttgttttaaaaataaataaataaataaagtacgttagttaagggaggttgaaaaaaaagagagagagagagataggtagagacgacggagttttataattggaaatggaaagaaaggaacgttggtcgggggcgtagtgagcgtagaggggaatgtgtttggtgtgttttaggatttaaatagagatagtgagagaggaggaaggtagagaggtattttagataagttgtaggtgttagtgagtaaggtttagaggtttaggggattaaggtgttttttgataaattagagggatgttgtggttagaggttttttttttttttttttttttttaattagatagagttttattttgttattttgttatttaggttggagtgtagtggtacggtttcggtttattgtaatttttattttttaagtttaagcgattttagtttttttagtagttgggattataggtatacgttattacgttcggttaatttttgtatttttagtagagatagggttttatcgtgttgattaggttagtttttaatttttaatcgtaagtgatttgttcgttttagttttttaaagtgttgggattataggtgtgagttattgcgtttagtcgacggttttggttaaagtaaaggaataaataaataaaaatttttttcggtagttgtttaggtattttatatttttgaggagaaatttttgatttttttaatttttttattattattatacggggaaattgaggtttagagaaaggtaatttaatttttaaagtatataagtaggtttattttttaagcgttggtagagaatttagtgttatataagatgttatttatttttataataaagaaaagagtttgtgtgaatttataatagttatttggggtaaggtattatttttatttgtatttcgaagattgaggaggtaagtttaaatagttaaagttattggtttaaggttatatagcgcgtgtttagtggttgaggttgattcgtagttattttagtggtaattgtagaaagtaagtttgtatttaatttgaagttttcggtgattgggtttggtgggggttgtagaggggattttgtagagtgtatttttgtagaggttgagagtttaagtttttagggtaggagttgtttgtattttttattatttggttttaagtttttttttgggatgtttttttttttatatttatatggtttttaatgatttttttatattagtttatattttattttttgggtgagatttagaatttttttatttttttttttttatttttttattttatatttattttttagttttttttattgttttatttttttttttaaatttttattagtaaggttaggcgtaatggtttatatttgtaattttagtattttgggaggtcgaggcgggtggatcgtttgagtttaggattttaagattagtttgggtaatatagtgagatttcgtttttataaaaaaatataaaaaaaaaaatttagttaggtatggtggtgtgtattttgtaattttagttatttgggaggttaaggtaggaggattttttgagcgtaggagttcgaggttgtagtgagttgtgattgtattattatattttagattgggtaatagagggagattttgttttaaaaaaatttaaatgaataaatttttattttttttttttttattaaagtggaggttttttagggtagggattttgtttattttttggttattgtgtttttagtgtttatttagggttggtagatagttgtaataggagtgatagtttttggttagtagggatatggtgtgggggatagaggtggagtattgaagggatttattgggtagtattgttttttgatgttttcgatgttggagttgtattgggggaatgattgttattatcgttttttgagttatttaatttatttatggaagttagtaaaggaatttagtttgtttgtgtttgtcgtaattttaattttttttagttatttttgttttagtttttttgtatttgacgggtttattgaggttggggaggagggggtgggtgttttaaatgttaaagatttaatgtgttttgatgttattatataaaagttttgttttgtttgtttttttgagatagttttttttgttatttaggttggagtgtagtggtgtgattgtattttattgtagtttcgattttttgggtttaagcgatttttttattttagttttttattatatttagttaattttttttattttttaagagatgggggttattgtgttgtttaggttggttttgaatttttggtttcgagtgatttttttgttttagttttttaaagcggtgggattatagatgtgatttattgtattaggtttatataaggtgtttttttttatagggtgatgtgtatacggtgggtttttttgggtggttttataatagatgaggggtttagttttatttatttatgaattttggagattttagattttttatttatttagggttttgtagttttttttgaggttggagttaattttttttttcgttaagggattcggggagatcgttaagttcggtgtttttttgagagtttttgagaggtttcgatatcgttttcgttttaggttttcgggatgttcgcgtaggcgggagttcggggcgttcggggggatttttgagcgttacgtcgttgttgtggagcgcgtgttgataacgtcgtcggggagacgggcgggggcggggttcgggagagggggaggcgcggttttggcggcgcgcgaggggtcgggttgttagcgtaaggtttaggtcgtcgtagtggttacggtcgttgtcgttcgtcggtttatatatcgcggttaaatttaggttgcgttcggagttcgtttttattcgggacgcgttttcgtcgtcgtcgttttggttcggttttcgcgcgcgtcgcgtttataaggtttgggcgggttcggtcgcggtttatagagtcgttttcgttcgttcgcgtttcgattagttcggtttcgggtagttatttatcggtgttttcgttcgcgtttttttttttcgggtttcggttatggcgttgagtgaatttattttgtcgtttttttttattttcgttagttcgtgtcgcgagcgcggtttgtaggaggtgagggcggcggggacggcggggcggtcgggatcgtgggcggcgggttcggggtagtagaacgtgggttgcggggtgataggacgcgaaggcggggattgtagatttaggagaggaggatgcgggttacggggatcgcggatttagggtggtaaaaggtaagtagcgtttttcgagtttcgtcgttcgtttacgtttattgttttgtcgttcgtagt

SEQ ID NO: 98 - DNA, 5377 bp, Artificial Sequence
  chemically treated genomic DNA (Homo sapiens)
gttgcgggcgatagggtaatgggcgtgagcgggcggcggggttcggggggcgttgtttgttttttattattttaagttcgcgattttcgtggttcgtattttttttttttgagtttgtagttttcgttttcgcgttttgttatttcgtagtttacgttttattatttcgagttcgtcgtttacggtttcggtcgtttcgtcgttttcgtcgtttttattttttgtaggtcgcgttcgcggtacgggttggcgaaagtggagaaggacggtaggatgggtttatttagcgttatggtcgggattcggggagaaaggacgcggacggggatatcggtgagtggttgttcgaggtcgggttggtcggggcgcgggcgggcggggacggttttgtgggtcgcggtcgggttcgtttaagttttataggcgcggcgcgcgcgggggtcgggttaaagcggcggcggcggaaacgcgtttcggatggggacgagtttcgggcgtagtttaaatttagtcgcggtatataagtcggcgggcggtagcggtcgtggttattgcggcggtttgggttttgcgttgatagttcggtttttcgcgcgtcgttagggtcgcgtttttttttttttcgggtttcgttttcgttcgttttttcggcgacgttgttaatacgcgttttataatagcggcgtgacgtttagggattttttcgggcgtttcgggttttcgtttgcgcgagtatttcggggatttggagcgggggcggtgtcggggttttttagagatttttaggggagtatcgggtttggcggttttttcggattttttgacggaaggggagattggttttagttttagagagggttgtagaattttggatggatgggaagtttggagtttttaggatttatggatgggtgaggttgggttttttatttgttgtgggattatttagagggatttatcgtgtgtatattattttgtaaaaaaaaatattttgtgtagatttggtgtagtgggttatatttgtaattttatcgttttgggaggttgagataggaggattattcgaggttaggagtttaagattagtttgggtaatatagtggtttttattttttaaaaaataaaaaaaattagttgggtgtagtgggaggttgaggtgggaggatcgtttgagtttaggaggtcgaggttgtagtgagatataattatattattatattttagtttgggtgatagaggagattgttttaaaaaaataaataaaataaaatttttgtgtggtaatattaagatatattaaatttttgatatttgagatatttatttttttttttttaattttaataagttcgttaagtgtagggaaattgaggtagaggtggttgggagaagttggagttgcggtaggtataggtaggttgggtttttttattgatttttataaatgaattaagtaatttagaggacggtgatgatagttatttttttaatatagttttagtatcgggggtattagaggataatgttgtttaatgggtttttttaatgttttatttttgttttttatattatatttttgttggttagggattgttatttttgttataattgtttgttagttttgggtaggtattggggatatagtaattaagagatagataagatttttgttttaggggatttttattttagtgaaggagggaaggatagaggtttatttatttgagtttttttgagatagggtttttttttgttgtttagtttggagtgtagtagtgtaattatagtttattgtagtttcgaatttttgcgtttaagagatttttttgttttagttttttaagtagttgggattataaggtgtatattattatgtttggttaaatttttttttttgtatttttttgtagagacggggttttattatgttgtttaggttggttttgaagttttgggtttaggcgatttattcgtttcggttttttaaagtgttgggattataggtgtgagttattgcgtttggttttattgataggggtttaaaaagaaaaatggagtagtagaagggattagaaagtgagtgtgagatgagggagtgggaaggagaaaatggggaaattttgaattttatttagggggtgaaatgtgagttaatgtgaaaaagttattggggattatgtgggtatgggaggaagagtattttaaggaggaatttggagttaggtggtgagggatgtaggtagtttttgttttggaagtttggatttttagtttttgtagaaatgtattttgtagggttttttttgtagtttttattaaatttagttatcggagattttaagttgaatataaatttgttttttgtagttgttattgaaatggttgcgagttagttttagttattgagtacgcgttgtgtgattttgaattagtggttttggttgtttgggtttgtttttttaattttcgaaatgtagataagaatagtattttattttaaatggttattgtgagtttatataggtttttttttttgttgtggaagtaggtgatattttgtgtgatattgaattttttattagcgtttgggagatgggtttgtttgtgtgttttgggaattgaattgtttttttttgggttttagttttttcgtatgataatgatggaaagattaagggaattaggaatttttttttaaggatatgggatgtttgggtagttgtcgggaagggtttttgtttgtttgtttttttgttttggttaagatcgtcggttgggcgtagtggtttatatttgtaattttagtattttggaaggttgaggcgggtagattatttgcggttagaagttggagattagtttggttaatacggtgaaattttgtttttattaaaaatataaaaattagtcgggcgtggtggcgtgtgtttataattttagttattgaagaggttagaatcgtttgaatttgggaggtggaggttgtagtgagtcgagatcgtgttattgtattttagtttgggtgatagggtgatagagtaagattttgtttaattaaaagaaaaaaaaaaaaaaaaagatttttgattatagtatttttttagtttgttagagagtattttggttttttgggtttttgagttttgtttattggtatttgtagtttgtttgaggtatttttttgtttttttttttttttattgtttttgtttgggttttgaaatatattaagtatatttttttttgcgtttattgcgttttcgattagcgtttttttttttttatttttaattgtgaagtttcgtcgtttttgtttgtttttttttttttttttttttttaattttttttaattaacgtattttatttatttgtttatttttgagatagagttttgttttgttgtttaggttggaatgtagtggtttaattttggtttattgtagttttcgtttttcgggttttagggatttttttgttttagttttttaggtagttgggattataggtattcgttattatgtttagttaatttttgtttgtttgtttgttttgttttagtagagatagagttttattatgttggttaggttggttttaaatttttgattttaagtgattcgttcgttttggttttttaaagtgttgggatttgggaggcgtgatttatagcgtttggtttggatttttattttttatagtagttttaggtttatagaaaaattgagtacgaagtatacggcgtttttaggtagtatttttcgtattattttaattttttttttattattattttgtattagtgtggtgtatttgtgataattattgagtagagaggaatatattgttattaattaataataataataatttatagtttatttatttatttattttgatatagggttttgttttgttatttaggttggagtgtagtgacgcggttatggtttattgtagttttaaatttttaggtttaagttatttttttagtttagttttttaagtagttgggattatagatgtgtattattatgtttggttgatttttgtttgtagagatagggttttgttatgagtaatttaatttatgagtaatgggttaaatagtggttttataaagaaatgtttgagttttaatttttggtatttgtgattatgattttatttagaaagagtttttttggttgggtatagtggtttacgtttgtaatttaagtattttgggaggtcgaggtaggtggattatttgaggttaggtgtttaagattagtttggttaatatggaaatttcgtttttattaaaaatataaaattagttaggtacggtggtttgcgtttgtagttttagttatttgggaggttgaggtaggagaattatttgaattcgagaggtggaggttgtagtgagtcgagatcgtatttttgtattttagtttgggcgatagagtgagattgttttaaaaataaaaagagtttttttgtagatattatgaagcgttttgaggtgagattattttggattaaggtgtgttttgatttagcgataagagtttttaggagagaaaggacgtaggaatataaatatagagaagaagggtatgtgaagatggttagagattggagtgaggtagttataggtttagggatattttcggagttattagtagtaaaattgggaaaagattttttttgtttttttttttttttttttagatagagtttttttttgtagtttaggttggagtgtagtggcgtgattttggtttattgtagtttttattttttgggtttaaataatttttgtgttttagttttttaagtagttgggattataggtgtatgttattatgttcggttaatttttgtatttttagtagagatggggttttattttgttggttaggttggttttgagtttttgattttaagtgatttgtttgttttagttttttaaagtgttgggattataggtttgagttattgtatttagttaagggaatagatttttttttagatggttgggtgtggtggtttacgtttgtaattttaatattttgggaggtcgaggtaggagtattattggagtttaggagtttgagattagtttgggtaataaagtgagattttttcgttataaaaaatataaaaattggttgggtatggtggcgtatatttgtggttttagttattcgggaggttgaggtgggaggatcgtttgagtttggaaggtagaggttgtagtgagtcgagattgtatttattgtattttagtttgggtaatagagtgagattttatttaaaaaaaaaaaaaaaaaagattttttttcggagtttttagagggaattaattttgttgatgttttgattttgggttt

SEQ ID NO: 99 - DNA, 5689 bp, Artificial Sequence
  chemically treated genomic DNA (Homo sapiens)
  unsure (3724, 3742..3743, 3755..3756, 3759..3760, 3872)
taatgttattatgtagatttgatttagtaggtttgggtggggattgaggttttgtattttttattagtttttttgtgatgtgtttgtagtgtagtttcgataagtttatttggggttttattaaagatatttaagtgtggatgaaaatgaatttttgcggttttagatgtattttagagaaatattgaaaaggaatattaaggaaattttttatttgtttcgtttttttttgtgtgtatgtgttttatttatgaaaatttttatatttgggttatttgaaagtttgttttttttttttttgagattgagttttattttattgtttaggtttattgtaatttttattttttaggtttaagtgatttttttgttttagtttttcgagtagttgggattaaaggcgtgtgttattatatttggttaatttttgtatttttggtagagaagggatttttttatgttggttaggttggtttcgaatttttgattttaaaatgattttttcgttttggttttttaaagtgttaggattataggagtgagttattgtgttcggtttaaaagttttttaaattttaaatgtatgagatttttttagttaattttttgttatttttttattttaattgtattaggtttaagaatatattaatattatagttttttaaaatttgttgagatttggttgggtagggtggtttatatttgtaattttagtattttgggaggtcgagataggtagattatttgaggttaggagttcgagattagtttgattaatatggagatattttatttttatagtaaatataacgttagtcgggcgtggtggtttatgtttgtaattttagttattcgggaggttgaggtaggagaattgtttgaattcgggagacggaggttgtagtgaatcgagattacgttattgtattttagtttgagtaataagagcgaaattttattttaaaaaaataaaataaaataaaaaaaattatttgttgagatttgttttatagttaagtatatggttaatttttgtaaatgttttatgagtgtttgaagataatatattttataattgttgggtgtagtgttatgtttattaggttaaattttttaattaggttgataggtttttatattttattgatttttaaaaggagatgtgttaaaatttttagtttttttattaggaaagttttttttttttattttagtttacgttatttacgataagtaaaatgttacgtggtttttgtagatttagtttttattttaatgtaattgataattttagaagatttttttggttattaatatttttttaattttattttatatttggtatttttttttttttttttgagtttttatagtatttattgtttatataaataatttgatatttatataatttgtttttattataattatttgagttgataatttatttttgttaggttttaaattttatatgggtaaagattattttattttttttttataatagttttattggaatatagttattgatatattataaaatttattttttagaagtatatagtttaatgggaaattattttatttattttggtatcgtttatagttgtggtttttagttttgggtgtatattggaattattggaagagttttaaaaaattttttagtttggaaaaaaaaaattttttagtttggattttttttttagaggttttggtttaattggtttggggtgtggtttggggatgggaatttttttaagtttttaggatgattttaatttgtagtcggggttgttttagagtgttttgtttatagtaggtatttaagaattgtttgttgtaattattaattagttttaatttttagtatttagttaattaatttatttaaaagtggtcgtttgtttttttaatagtttattagtttttattatataatggtttgtttatatttgtttttttaatttagtaggaaaggaatattatgagataaaagtatgtagaaaaggtaagtttatttgtaaagatgtgtagatttagtaggattggattattgaataagaaatataatagatattagatcgcgagcggtggtttacgttataggcgtgagtacgtgagtattttgggaggtcgaggcgggtgtattacgaggttaggagtttcgagattagtttggttaagttggtgaaattttgtttttattaaaaatataaagattagttgggcgcggtggcgggcgtttgttttagttattcgggaggttgaggtaggagaatcgtttgaattcgggagagggaggttgtagtgagttaagattgcgttattgtattttagtttgggcgataaagtaagatttcgttttaaaaaaaaaaaaaaaaaaaaagagagagagaaagaaatataatagatattaaaggaaaaaatgtaaaggaaaaagtattatatttatatttgtttttttagtatagatgatatgtttacgttgaggaatgtgtgttataagaattgtgtgtgatatatttttaaatttttatatttaaaagttagggataatatggtatttattcgggaattagtaatttatgggaaaagtttaagatgttatttattttggagattagatgtaaaggagtagtatgggtattttgttttagggtggaaagtgtttgttatggttttttttttttttatgggatttgttgtatatttttataatggcggtaggatcggtacgtttgtttgtatagttgtgagttgtatgaaggtagggatggttttggttttattcgttatggtatttttttgtggtaagttaggtgtttaataaatatcggtggaatgtatgtgattatattttatgttatagtatataaatatgattttaattggatagggaattgtaaaagttttttatattgattttttttgtaattttaattatggtattttgagttgggatattgtttaaattgtttgggttataataaattttgaaggggtttttatttttacgtttatagtggttgagggttcgcgttgtgtgaacgttggagttttacgtgagtagttgagtagcgaggatggttatttttagataaacgaatataggattttcgcggttgggagcggtcgttcggcgaggtcggttattttgtttgttcggtagtattacgaaatatttgttattgatatttttttattagttttcgagggttcgcgtaggtatttcgagtcgcgttttttggttcgtcgtagttagattttttttcgggcgggttacgtttttaggcgtaaaacggaattatttcgtatgaagaagataaagtataattagttatattaaagagaggtagtattatttagatagtcggttatttttttagagattttatttagttttttgggttcggcgtttagcgcgtagacggtgttcggttttaggagttttagttttttttacgtgttttgtttttttagtagttttttttgtcgtttcgggaggaaaattttttgataattcgcggtttgcggattacgatttttaggaggcgtcgcgtcgcgtttacgtagggagtcgtagttcgtagatcgcgagtagttaggagattttttttcgaggagaagagaagatgtggaagaaagatagtagagagagagggtgagtttatttttatatgtttttttttttttattatttaaaaataattaaaaaaanataggagagtttaataannttaaaaaaaaanntannataagaaaagataataatgatataaaaaatttattaatgaaaaagtgtaaatgaaaaggaataaatattaattaagtgatttattttatatatattagagtaaagtgattantggaggttataaaataaaaatgagtaagagaatgatataaaaaatatatagagtagaaaatagtatgtaggataaagtggtgaaaaaaaagtgaaaatgttaaaaaatagaaaaaagcgaaaagtaatgataaataaagatacgtagtatattagtttaattaatgaagtaagataaataagaaatatataatttattaagaataaataaaatgttaattaaagtagttggtaatattaatagaggggtaggaggaatgtttggtagcgttgaaaatgtaaatatatagttgataaaagatatttacgatgtataagtcgtatataatttattttacgagtaatatagtaaaaaagataatgtttatagtagaataataattaaataaaaatttgtttttaatatataatatattataaaatgcgaaaattaattatatagaggagataattatatttgagtaaatatgaataattatattattatattaatgtttaatatataatttaatatatgattaaaaaataaaaaataatatgtatttatttatataatttatatttggatattaaaaatgtaatgttttataattaaaataaattaattttttattaaaaattaatatatataaatttataaattatcgttttttttttttttttcgggtcgcgtaggcgttttgggtttcgttattaagtcgggttggcgtcgtttggatgcggtttttttcgggatttgtagtttttttggagttattcgggtcgtttgttagagggataagatttataagtttcggttgttttagcgttgcgagtttggttacgtggcgggggtcgaacgggcgtgcgtgtcgtcgttgattcggtgttgtagtgaggaggtggtttttgttcgtgttgtgtgtgtgtgtgagtgagagagcgagtgagtgagtgagtgagtgtgtgtgtgggggggattcggtttgttgttgtcggtgattttttttttttttttattttttttttttttcgtcgtcgttgtagtggtcgttttttgggtcgtaggaaatgagcgataacgatgatatcgaggtggagagcgacgtgagttttggggttttttttttttcgtgcgggttgttaggcggggatagcggtcggggtttttagcggggcgacggcgggagggggtcgggttgtcgtcgttttttttttttttttttcggggttaggagtgttttcgtcgcgttttcggttcgttttttttcggtttttggtcggagcggttttttgggattggaggttgggggaagatacgcggtttttgggatttttatttttttttttgcgggagggtgttgcggtttttcgtttttatttttttcggtttaggattcgggggataaggatggggggcgttcgggattttattgttcggatttaggggaaggggacggcgtttaggatttgttttttcggattgcgatttttttttttcgtgattcgcggattttgggggtcggggaagggcggagaggggttgggggtgtttagatgttcgagttgggtttgtagggaggagatagttttcgggatttttttggtttaggtcggatttcggaaggaggggcggcgttcgggatttttttattttgttatcggatttcgtcgagggtggaagggtgggggtaaggggtggggagggaggaaggggtgtcgggttgattttttatttttcgttttttttgtcgtcggtatttttttttttattattgaatgttaagtgtaaaaataatttttatattttttattttttttttttttttttattttagg

SEQ ID NO: 100 - DNA, 5689 bp, Artificial Sequence
  chemically treated genomic DNA (Homo sapiens)
  unsure (1818, 1930..1931, 1934..1935, 1947..1948, 1966)
tttggaataagagagaaaaaaaaaaatagaaaatatagaagttatttttatatttaatatttaataataagaaagaaaatgtcggcggtagaggaagcggagggtggggagttagttcgatatttttttttttttttttattttttgtttttatttttttattttcggcgggattcggtagtagggtagaggggtttcgagcgtcgttttttttttcgggattcgatttgggttagaggggtttcgagaattgttttttttttgtagatttagttcgggtatttaggtatttttaattttttttcgttttttttcggtttttaggattcgcgggttacgggaggagaggatcgtagttcgaaggggtaggttttgaacgtcgttttttttttttggattcggataatgggatttcgggcgttttttatttttgtttttcggattttgagtcggggaaggtgggagcgggaggtcgtagtattttttcgtaagggaggaggtgggggttttagaagtcgcgtgtttttttttaatttttagttttaggaggtcgtttcggttaggagtcggaggggagcgaatcgggaacgcgacggaggtatttttggtttcgaggggaaggggaaggaggcggcggtagttcggttttttttcgtcgtcgtttcgttaagagtttcggtcgttgttttcgtttgataattcgtacgggaaggaagaagttttaggatttacgtcgttttttatttcgatgttatcgttatcgtttattttttacggtttagggagcggttattgtagcggcggcggggaggggaaggggtgaaggggagggggaagttatcgataataataagtcgagttttttttatatatatatttatttatttatttattcgtttttttatttatatatatatataatacgggtaagaattatttttttattgtagtatcggattaacggcggtacgtacgttcgttcggttttcgttacgtgattaggttcgtagcgttggggtagtcgagatttgtagattttgtttttttaatagacggttcgggtagttttagaaaaattataaatttcggaagaaatcgtatttaggcgacgttagttcggtttgatgacggagtttaaggcgtttgcgcgattcggggaggggggggggggcggtggtttataaatttatatatattagtttttaataaaaagttaatttattttaattataaagtattatatttttaatatttaaatatgaattgtatagatgaatatatgttattttttattttttaattatatattaaattatatattgaatattaatgtagtaatataattgtttatatttatttaaatataattattttttttatgtaattaattttcgtattttataatatattatatattaaaaataaatttttatttgattattattttattgtgaatattattttttttattatattattcgtgagataaattgtatacgatttgtgtatcgtaggtgttttttattagttatatatttatatttttaacgttattaaatattttttttatttttttattaatattgttaattattttaattaatattttatttatttttgatagattatatgttttttgtttgttttgttttattaattgaattaatatattgcgtatttttatttgttattatttttcgtttttttttattttttaatatttttattttttttttattattttattttatatattattttttattttatatattttttatattatttttttatttatttttattttataatttttantaattattttattttaatatatataaaataaattatttaattaatatttatttttttttatttatatttttttattaataaattttttatattattattatttttttttatnntanntttttttttaannttattaaatttttttatntttttttaattatttttaaataataaaaaaaaaaaaatatataaaaataaatttattttttttttttattgttttttttttatattttttttttttttcggaggaaaattttttgattattcgcggtttgcggattgcgattttttgcgtgagcgcggcgcggcgttttttgggagtcgtagttcgtagatcgcgagttgttaggagatttttttttcgaggcggtagaggaggttgttgggaagataggatacgtggagggagttggagtttttggagtcgggtatcgtttgcgcgttggacgtcgggtttaggggattgggtggagtttttgggggagtagtcggttgtttaaataatgttgtttttttttggtgtgattggttatattttgttttttttatacggagtggtttcgttttgcgtttaggggcgtaattcgttcgggagggaatttggttgcggcggattagggggcgcggttcgggatgtttgcgcgaattttcgggggttggtggggaggtgttagtggtaggtgtttcgtggtgttatcggataggtagaatgatcgatttcgtcgggcgatcgtttttagtcgcgagaattttgtattcgtttatttgggagtgattattttcgttatttagttatttacgtgaggttttagcgtttatataacgcgaatttttaattattatggacgtggaagtaaaagtttttttagagtttgttgtagtttagatagtttaggtaatattttagtttagagtattataattaagattgtaaaaaggattaatatgggaaatttttgtagttttttgtttagttaaaattatatttatatattgtggtatgaagtgtaattatatgtattttatcgatatttattgaatatttaatttgttataaggggatgttataacggataagattaaaattatttttgtttttatgtagtttatagttgtgtaagtaagcgtgtcggttttgtcgttattgtaagagtgtgtaataagttttatgggaaggaagaaaattataatagatattttttattttgagataaagtatttatattatttttttatatttggtttttaaagtgaatgatattttgagttttttttatgagttattgattttcggatgaatattatattatttttgatttttgaatgtggaaatttggggatatgttatatataatttttgtgatatatattttttaacgtgagtatgttatttatgttgaaaagataaatgtaaatgtggtatttttttttttatatttttttttttaatatttattgtatttttttttttttttttttttttttttttttttttttgagacggagttttattttgtcgtttaggttagagtgtagtggcgtaattttggtttattgtaatttttttttttcggatttaagcgatttttttgttttagtttttcgagtagttggggtaggcgttcgttatcgcgtttagttaatttttgtatttttagtagagatagggttttattaatttggttaggttggtttcgaaatttttgatttcgtgatatattcgtttcggttttttaaagtgtttacgtgtttacgtttatagcgtgagttatcgttcgcggtttaatatttgttgtattttttatttagtgatttagttttattaagtttgtatatttttgtaagtgaatttattttttttatatgtttttgttttatagtgttttttttttgttgagttggggagatagatataagtagattattatgtgataagagttgatgggttattggggagatagacggttatttttgagtgagttaattaattggatattagaagttaaagttaattgatgattataatagatagtttttgggtgtttgttatgaatagagtattttagggtaatttcggttataagttaaaattattttaggagtttaaaaaagtttttatttttaggttatattttaaattaattaagttagaatttttgaaggggagatttagattgaaggattttttttttttagattgaaggattttttaaagtttttttagtaattttagtgtgtatttaagattgagaattatagttatagacgatgttagaataaataagatagttttttattgaattgtatgtttttaaagagtgaattttatggtatgttaataattatattttaataaaattgttataaaagaaaaataagataatttttatttatgtggaatttaaaatttgataggagtaaattattaatttaaataattgtgatgaagataaattatgtaagtgttaaattgtttgtatagatagtgaatgttgtaagagtttagaggaggaagaaggagtgttaggtatgaggtggggttggggaggtgttggtgattagggaagttttttgaggttgttagttgtattagggtaagggttgggtttgtaaaggttacgtaatattttgtttatcgtgaataacgtggattgaggtgaggaggaaaggtttttttggtagggagattggagattttaatatatttttttttaggaattaatagaatatgaagatttgttaatttgattaagaaatttgatttaatagatataatattgtatttaatagttgtagaatatgttgtttttaagtatttatggaatatttataaaaattgattatgtatttagttataaggtaaattttaataagtggttttttttgttttgttttgtttttttgagatggagtttcgtttttgttgtttaggttggagtgtaatggcgtgatttcggtttattataattttcgtttttcgggtttaagtaatttttttgttttagtttttcgagtagttgggattataggtatgagttattacgttcggttaacgttgtatttattgtagagatggagtgtttttatgttggttaggttggtttcgaatttttgattttaggtgatttgtttgtttcggttttttaaagtgttggaattataggtgtgagttattttgtttagttaaattttaataagttttaaaggattataatattagtgtatttttggatttagtgtaattaaagtagaaaaataataaaaagttaattagaaaagttttatatatttgggatttaagaaatttttaggtcgggtatagtggtttatttttataattttagtattttgggaggttaaggcgggaggattattttgagattaggaattcgagattagtttgattaatatggggaaattttttttttattaaaaatataaaaattagttaggtgtggtggtatacgtttttaattttagttattcgggaggttgaggtaggagaattatttgaatttgggaggtggaggttgtagtgagtttgggtaatagagtgagatttagttttaaaaaaaaaaaaagtaaatttttaaatgatttaaatgtagggatttttatgagtgaggtatatatatataggaaagaacgaggtagatgagaagtttttttagtgtttttttttagtgtttttttgaggtgtatttaggatcgtaagaatttatttttatttatatttgagtgtttttggtaaaattttaggtgagtttatcggggttgtattgtaaatatattataaggaagttggtaagaaatatagaattttagtttttatttagatttattaaattagatttatatgataatatta

SEQ ID NO: 101 - DNA, 6078 bp, Artificial Sequence
  chemically treated genomic DNA (Homo sapiens)
gggattaaaatagaggaatggaaatagtttgagtaaatttatagacgaggaaggaaggtataagtttttggatttttttaattttaattgattttagtatgaaaagaaagtagggtttggattggaaaggaagtttattttttggtaatgtggaaggttttgtttatgggtgaggatgtggaaggttttgttcgtgggtgaggatgtggaaggttttattcgtgggtgaggatgtggaaggttttgttcgtgggtgaggtagttggatgcgatttaggaaagaatgggggttttttgagggtttagtgtaggagagagatatatttatggttataattaagggtttgtttttaattttttttatacgttaatgatttttatattatatttttgttttggattttagatttttggatttaatagtttgtttggtattttttttttaatgttttataggtattttaaatattatttttgttattttttttatatttgtttgagtcgtgttttttgtatttcgattgatgataaaaattttttttaggggtttaggtttaaaattttagaattattttgattggtttttttttattttatatttagtgtgttaggaaattttattggttttatttttttttattgttagtagtttggtttgagttatcgttttttttttttgggtgattattatagtttaattggttttttgatgttatttttggttttttcggtttatttttatatagtagttagagttatttttttaaaatattagtgagattatattatttttttttttaaaatttttattttttttaaagaagaaaataagtttttataatggtttgtaagattttatttggttaaattatggttgttttttagaatttttttttagtttggttttggtttatggagtttagattttttagttttttggttgatttttagatgtattaggtatgcgttttttcgagtttttagtgttggttgttttttttgtttgggatatgttttatttggatataggtaggataattttttatttttataaagtttttgttgttgaattatttttttagtggtaatggttttgtttatgtaattaaaaagggttatttaatttattagtattttttattttatttatttatttgtttttttttaaagtttttagtacgttttgttgtgtaatttgtgtattatttttattgtttattgtttgttttttttaattagaagttaagttttgtgtggatagggttatttgtgagttttgttgttgatattttatgtttttggaatattgtttggtttaaggtagatttgtaatatatgtttgtggagtgaatgaaggggatagtgtagtagagggtataggaagtagagaaggtatttgttggtagtattgttatatatttgatggtttggattagtttgataatgttagtgggaacggaaggtggtaggggatgtaggagatagggtgggtatgtatttagggttgggtaatttaatgtgggagatgttaagttttgtgatggatgatgtattaattgggttttagtttcgtgtggttttataagtgttattttgttttagggtcggggattatatgtttttcgttgttgaattgtttgtggattatagaggtaattaggtaaaattgggtggataaaatgaataaaatattaattttgtaaaaatagtttagaattgcgtatttttttagtggattttatagagtgttaaagtatgatatgtttaggataggtacgtgttttatattggggttatttgaaggaggtggatagtttttttattttattgtttttagggaaaatttttttatttggggttttagttttttgttataagtaaagtattgatatgtgtttaaagtatgtatgtagaatttttaaatgatagttttatgtatgtataatttttttggttgtttgaaatttaggtgttttatttgtagattttgaaagtttgtgatttttttgtaatagggtagttttagaggttgttagtggtgttttgttttgttttaatagacggagatatgatggtagtggtttattttggttatttattttaattattagtttgaagtattaaaagttaattatatttataaaatatattcgattattttaatgggattttgaaaattgtatgatttatgaaatattatatagatttttttggttaatattatatttaaatattatttattattatgttttttttttttttatttatgtgtatatgtattgtagatttatgtatgtagagttttttaaagataagaatagtttgttttttatttttgtagttttttgggtttagtatagtattagatataaagtaggaattaataatttgtatttagagagtgtggtggttttggagttaggttgagtaggtttaagtttggattttttttttattagttgtgttattttagataagttatttaatttttttgtgttttggtttttatatttgtaaaatgggtataaaaataagatttatttgaaaggtatattgtgaatattaaggagattatttttgtaaagtatttagaggtatgtttggtatattgtgagaattcggtaaatataattagtttttataattatatgaatgtgtggaagaagtatagtgattaagagtagtggttttggagttatattgtttgggtttaaattttggttttgtattttgttatttgtatattttaggataagattatttatttttttaggttttagttttttgtttgttaaatagggatattaagagtattttttttttttaaatgtttgtttgagattttgtatgtgaaatagtacggtgtttagtatgtatttaatgagtaaaaataataataatggtatttgattgtatttaaaagttgttattaagtattattattatttatgtaatttttttttaaaaaataaaaaattggattttataataatgtattaatttagtttgtaaatatatttgattagtagtttttggattatttagagtttaagtatttagttagtagtgatagatgaagaatagttggggtttgttgagggaaaagattttttttatagtttataggtaggttttaagagaaagaggaagtaatgttatagtttattaagttgggttgaatttgattagaagagattttagggtttgaagttagttttgtttattgggatatagagatggagattttaatgttgtgagtttgggtgtgttgttttaaggttttcgttttttttaggtacgtattggagaaatatgtagtagtaggaattttgagaaaaattagtaggtatttattgagggtggattatagtgaagaaaaattttggatggggatttttagaaagggtgagtgagtaatagttgtatagtaggggatataggattttagtttataggtagggttttttggaggtaaaggtaaaaggtagagttttattttggtaaggagtttggagggaggtaggtttttagattttgaatttggaggtaaaaagagaagtttgcgggattttgtagtataagacgtgggatattcggcgggtgttagggtttgaaatagagtagttgtttagttaaagttagggttatgagttagtattagttggtgtaaagatttagtgttatttgaggattgattttggggatttgggttttattgggggagtgttggttaggcgggagttttggtaatgattaagggtattaaaggttgggtttgatgagaaggaatgaataggtagggtggtcgtgagggtgatagaagattttagttgaatagagtaggttttttttttgtttttttttttattattgtttttttgtatgttaaagtgttagcgaagatgattttattcgtgttacgggtgagattttgttaatgtatatttatttagtttgtaaaagtaattttaaattaattgttggttatatttatttattttttttgatttttattttgttagattgaatgatttttttttttttttatgtaattttaatattaaggatgatttttattaagttattttttgtaattagaatataaaaattattttaatatttttttttgaaaatggatttttagagatttagtagttttttatgtattattaatgagttttttagtgaaatattttgttttttattaaaataaattttttttattaaatttttcgtgggaaaaatcggatggtatttaagttgattagttttattggtagaaaattatcgtatttgttagggatttgggggttgttatagtttatttttgagtaaatagggagattttattatttaagattatgaaaaaaattgaatatatatttatagaaataatttttagtgttggaggagattgtagtattttgttggtgtaatcgttaattttaagataaaatatattatttaatatttgttagaggtggttgtgttcgttttttaaggttgttataattagtattataaattggatggtttagagtaatagaaatttatatttttatagttgtggaggttagaggtttaaaatttaagggttaaaggttatgtttttttagaagattttttggaagggtttttttttttttttttgagatagttttttattttgttatttaggttgtattttgagagggaaattttttttttattagtatggatgtattgtttttatatattgtaagtgttgtgttattgtgttagttattttattagggttagttttagacgagtagggttgacgagttggttggggattggttggtttcggttgggagggatttgtcggaaggaagggttgtagtttatagtaatagagtttagattgtttttgttttattatttgaaggtaaaattttttagatacggtagacggtttttagagtataataaatagggaatgagaattatttatatggaagttttttttttatgatgcggtggagaagtttcggttatttggttttgttagatgtttttggggttattgtaaatgggaaggataggtagagttaaataaggtaggagaatcgttttttttttttgaatgtttaaagagtttgttgtagtatgttgtattttatgtgtgttgtttacgggagttagggaaattggattttattaatttaattgtaatatttgcgggggattttggagttttacgtaatattttgatttgagaaaaagaaatggtaaagtttgaatttatgtcgtttgtttggggtgaggtaagaaatcgagtttttatgtaaagaatcgatttatttattatattattttttaaaaattatttgaattttttggagtaattttatttttttgttgtgaaaaattgttatattgttatagttagtttttaaatagataaagtttatatggattttattatttgaaaatagatttgtaattaaggattaaaaaaaaatttatggtaaataattatcggttgaatgtttggttaaacgtatgtgtttatttattaaaaattagggatttatttagttttataatgttatagttttaattgagttttaaaagtatattttaaataatttagtaagaggtagttttttggtaagttttcgatattgtagtttaatgtttatatttttttttttggtatgtttgagtttttgtttttagtttaaaagtggaattattatatttaaaagtaaagttgggttaataatgtttattgtaattatttgatttttatgtatttttaatgagaatatatagttagtagaataatttaatgagggtaggttagtttttaaagttgtgtttttattatgtcgaattatattaattttttcgttgagaagtagtagtgagaaatgatggagaagatttatttttaatatatttggtttaggagaaggaaaggatatatttgttaaagaattttttttgttttttttcgttttaaatttttgttaggtatgaggaaattgtgtttttttgttaggtttcggaagtatgtgtttataataaatgtgtaatatttttagaatagttagt

SEQ ID NO: 102 - DNA, 6078 bp, Artificial Sequence
  chemically treated genomic DNA (Homo sapiens)
gttaattattttaaaaatgttatatatttattgtaaatatatgttttcgaggtttaataaaaaagtatagtttttttatgtttggtagaaatttaaaacggaaaagggtagaaagaattttttagtaaatatatttttttttttttttgggttaagtgtgttaaaaataaattttttttattattttttattgttgttttttagcgagaaagttgatatggttcggtatagtgaaaatatagttttaaaagttagtttgtttttattaaattattttgttggttgtgtgtttttattaaaaatgtataaagattagataattgtagtaagtattattaatttagttttatttttgaatataatggttttatttttaagttggaaataaaggtttagatatgttaggaaaagaaatgtaaatattgaattatagtatcgaaaatttgttagaaagttattttttgttaggttgtttaaaatgtgtttttgaaatttaattaaagttgtagtattgtagagttaggtaggtttttaatttttaataaatagatatatacgtttggttaaatatttaatcgatgattatttattatgaatttttttttaatttttaattgtaagtttgtttttaaataataggatttatgtaaattttatttatttgggaattagttatggtaatataataattttttatagtaagaaaataagattgttttaaagaatttaaatggtttttaaaaaataatataataaatgaatcgattttttgtataaaaattcgattttttgttttattttaaataggcggtatagatttaagttttgttattttttttttttaaattaaaatgttacgtaaaattttagggtttttcgtaagtattataattgaattagtggaatttagtttttttggttttcgtaagtagtatatatggaatgtagtatattgtagtaaattttttaaatatttaaaaaaggggggcgatttttttattttgtttagttttgtttgttttttttatttatagtaattttaggaatatttggtagaattaagtggtcgaggtttttttatcgtattatgagaaagaaatttttatgtaaatagtttttattttttgtttattgtattttgaaagtcgtttgtcgtatttggaaaattttatttttagatgatgaagtaaagatagtttaaattttgttgttgtaagttgtagttttttttttcgataaattttttttagtcggggttagttaatttttagttagttcgttagttttattcgtttgaaattggttttaataggatgattgatatagtaatatagtatttgtagtgtgtaaaaatagtgtatttatattgatgaaagaggaattttttttttagaatgtagtttgggtgatagagtgagagattgttttaaaaaaaaaaaaaaagatttttttagagaattttttgagggagtatagtttttgatttttggattttggatttttggtttttataattgtaagaatataaatttttgttgttttaagttatttagtttatgatattggttatagtagttttgggaagcgagtatagttatttttaataaatgttagataatgtattttgttttgagattggcggttatattagtaaaatattatagttttttttaatattaagagttgtttttgtgaatgtgtatttaattttttttatgattttaggtaatgagatttttttatttgtttaaaaataaattataataatttttaaatttttaataagtacgatgattttttattagtgaaattagttagtttaaatgttattcgattttttttacggaagatttaatagaagagatttattttagtaaaagataaaatgttttattaaagaatttattagtaatgtataaagggttattgggtttttgaagatttatttttaaagagaaatgttgggataatttttgtattttgattatagagaatgatttgataaaaattatttttgatattaaaattgtatggaggggaaagaaaattatttagtttagtaggatggaagttaaagaaaatgggtgaatgtggttagtaattaatttggagttgtttttataagttagatagatgtgtattggtagagttttattcgtgatacgggtggggttattttcgttggtattttgatatatagagggatagtggtagggaggaggataggggagaggtttgttttatttagttggagttttttattatttttacgattattttgtttatttatttttttttattaggtttagtttttagtgtttttggttattgttagagttttcgtttggttagtatttttttagtgagatttaagtttttagaattaatttttaagtgatattgaatttttgtattagttgatgttgatttatggttttagttttgattagatagttgttttgttttaagttttaatattcgtcgggtgttttacgttttatgttatagggtttcgtaggtttttttttttgtttttaagtttaaggtttgagaatttgtttttttttaggttttttattagagtgaagttttgttttttgtttttgtttttagaaaattttgtttgtaggttggggttttgtgttttttgttgtgtagttgttgtttatttattttttttgagggtttttatttagggtttttttttattgtggtttatttttagtagatatttgttaattttttttagaatttttgttgttgtatgtttttttagtacgtatttagagagggcggagattttgagataatatatttaggtttatagtattgaaatttttatttttgtgttttagtgggtagaattaattttagattttggggttttttttggttaaatttagtttaatttagtgagttatgatattatttttttttttttttaggatttgtttgtaaattgtggaagaagtttttttttttagtaaattttagttgttttttatttgttattgttggttggatatttaagttttgggtagtttagaaattgttagttaaatgtatttataaattgaattgatgtattattatgaagtttaattttttattttttaaaaaggaattatatagatggtaataatatttggtaatagtttttgaatgtagttaaatattattgttattatttttatttattagatgtatgttagatatcgtgttgttttatatgtaaaattttagataaatatttgagagggggaggtgtttttaatatttttatttgatagatagagaattgaggtttgaggagatgaatgattttgttttagggtgtgtaagtagtaagatatagaattaggatttgaatttaggtagtgtgattttaaagttattgtttttaattattatattttttttatatatttatatggttataaaaattaattatgtttgtcgaatttttataatgtgttaagtatgtttttaagtgttttataggaatgatttttttagtgtttataatatgttttttaggtaggttttatttttatgtttattttgtagatgtggaaattaaggtatagagaggttagataatttgtttaaagtgatatagttagtaagaggaagatttagatttgaatttatttagtttggttttagaattattatattttttgaatataaattattgatttttattttatgtttggtattgtgttaggtttaaggggttataaagatgaaaagtaaattgtttttatttttgagaaattttatatatataaatttgtaatgtatatatatatgaatggaagggaagaaagtatggtaataagtaatatttaagtataatattagttagaaggatttatgtaatgttttataaattatatagtttttaaaattttattaaagtgatcgagtatattttataaatatggttggtttttaatattttaaattaataattgaagtgaataattaaagtaggttattgttattatattttcgtttattagggtaagataaggtattattaatagtttttgggattgttttgttatagggagattataagtttttagaatttgtaaatgaggtatttggattttagatagttaaaaggattatgtatatataaaattattatttaagagttttgtatgtatattttaggtatatattaatgttttgtttatggtaaaagattaaagttttagatgagggaattttttttaggaatagtagggtgggagaattgtttattttttttagatgattttaatatgaaatacgtgtttgttttgagtatgttatattttgatattttgtggggtttattgggagggtacgtagttttgagttatttttataggattgatattttgtttattttatttatttagttttatttggttgtttttgtgatttatagatagtttagtagcgaaaagtatatgattttcggttttggaatagagtgatatttataggattatacgggattgaagtttaattgatgtattatttattataaagtttggtattttttatattgagttatttagttttagatatatatttattttgttttttgtattttttgttatttttcgtttttattggtattgttaggttggtttaggttattagatgtgtgatagtgttgttaatagatgttttttttattttttatattttttgttgtattattttttttatttattttataggtatatgttgtaagtttattttgggttaggtagtgttttagggatatgggatattaataataaaatttataaatggttttgtttatatagaatttagtttttagttaggggagatagataataagtaataaagatgatatataagttatatagtagaacgtgttgagggttttggggaagaataagtgggtaagtaggatggggagtgttggtgggttgggtggttttttttagttatataggtagggttattattattaagaaagtaatttagtagtaaagattttgtggaggtggggagttgttttgtttgtatttagatgaagtatattttaggtagagagaatagttagtattaagggttcgggaggacgtatgtttggtgtatttgagggttagttaagaggttggagaatttggattttatgagttagggttaagttggaaaggagttttgagaaataattatggtttgattaggtagggttttgtaggttattgtaagaatttgtttttttttttgaaggaaatgggaattttgaggggaggagtgatgtgattttattggtgttttagaaggatggttttggttattgtgtgagaatggatcgaaggggttagaggtggtattaggagattagttaggttgtggtggttatttaggggaagaagacggtggtttagattaggttgttggtagtggaggaaggtggagttaataggattttttgatatattgaatgtgaagtggaaaaggattagttaggatgattttaaggttttgggtttgagtttttggaggggatttttgttattagtcgaggtgtagaaagtacggtttaagtaaatgtgggggaaatagtaggagtggtgtttgagatgtttataagatattgaaagagaggtgttaagtaggttgttgggtttaggaatttagagtttaggatagaggtgtggtatggaagttattggcgtatgaaagaaattgagaataaatttttggttatggttatgagtgtattttttttttatattgaatttttagagaatttttatttttttttgaatcgtatttaattgttttatttacgagtaaggttttttatatttttatttacgagtaaggttttttatatttttatttacgagtaaggttttttatatttttatttatgagtaaggttttttatattgttagagagtgagttttttttttagtttaagttttgttttttttttatgttgaggttagttggagttgggaaaatttaaagatttatgtttttttttttcgtttatgagtttgtttaagttgtttttatttttttattttggtttt

SEQ ID NO: 103 - DNA, 6018 bp, Artificial Sequence
  chemically treated genomic DNA (Homo sapiens)
tttatttttttattttttaggatagagttttgttttgtcgtttaggttcgagtgtagtggcgcgatttcggtttattgtaatatttgttttttaggtttaagagattttgttgttttagtttttcgagtagttgagattataggtttgtattattatgttcgtttaatttttgtatttttagtagggacggggttttatatgttggttttaaatttttgatttttagtgatttgtttgttttggttttttaaagtattgggattataggcgtgagttattgcgttcggttcggattttgttttttaaataatattatttagttttagatgtttggaaagatataaggaatttgaattatttttgtaattttagatggttttataaatattgtgaaatttagtattttaaatacggtttttgagttaaattttgtttagtttttattatgttttaaagattagttgtggttaggtatagtggtttacgtttgtaattttagtattttgggagggtgagacgggtggattatttgaggttaggagttcgagattagtttggttaatatagtgaaatttcgtttttattaaaaatataaaaattagtcgggtatggtggtataagtttgtaattttagttattcgggaggttgaggtaggagaattatttgaatttaggaggtggaggttgtaatgagttgagatcgtgttattgtattttaatttgggtgatagagtgagatttcgttttaaaaaaaaaaaaaaaagaaagataaaagattagttatgattaataaatataagtacgaagtggtttttgggttaagataagtttgttgtagatttttttttttttttttgagatatggttttattttgttatataggttggagtgtagtggtaggattatattataatttattcgggtttaagttatttttttagttttggtttttaagtagttaggattataggtgagtgttattacgtttggttaatttttttttgtaatttatagagatagggtttcgttatgttgtttaggttggttttaaatttttggttttaatagattttttagttttggttttttatagtgttgggattataggtgtgagttttgtttgtagagtttaggttttagagaatataaagatatttaaagtattttaattttttggaatattttttgggtattaagaataacgttattagaaataagtagtttgtttttagagaaattttaagtaagtataataaagggtaaagtgatataagataattgtggaatgtaagtaaatagtagtagttggtttgtatttttttaaatggtaaagttataaataatagtaattgtttttagagtgagtaggtagtttgttttttttttttttaaatggaatttattttttaagtgatgatatgtatttgggggtgggtaggtgtgagtttatttgtgttttgaaattttaaattaatgagtatgataaatcgttattgttggttttgtttgattttttattttgagtaattggtgggttttttttaatttttttttaatttttattttttttttttttttattgatttgggatagtttttgttaaagtgttaattatagtgggaaggaggagaaggggggaggttatagtgtatgggatttaaggttatagtgggcggagtaacggggattattaggtaagtaagttaagttttcgttgtttaagtttagttgtttgttacggtagtgtaatttttggcggacgatttaggacgcgttgacgcggtagtcgcgttatttttttttgtttgtatttatttgcgttgtttgaagtcgtgtgatttattaggatttagaggttgtttgattatattattgggttgtttgttgttttcgggttaggagattttggttggtttgaagggaagaagattagaggaagatttatcgaggatgggttttttttgttttttttcgggttggcgttgtttaggattcgttttttggtttcggtgtattcggttttttattgtgttagggatttgattggaagggcgggtttgttagcggatttggggttgttgattatatcgttgttggtgggttttttgaggatgcggatttgtggagggggtttcgggggaaaattattattttgaattataatgggtattttgggagatttgaattttttgttttttgtgtgatttttagttttttttttagacgtttattttttcgttgtttgtcgtttttttttagtttttagtaatttttttatattttattttattcgttattttttagatcgtttgtttttttatttttatattttttttgatttttgtagtatttaatattattatttgattttgattttttagatattattatatggtttttggttttttggtcgttttttttatttttttgttgttttaagttttgtttttagtttaagttttttattatcgaattttgttttgtgatttataatttaaaattaatttaattttttattttttttagattttttttggtaagtagtattattatgttttaggtggatattgagttatattgttgtggtagtgttggtatacgtagttttgaatattaggtttttgagtgaattttttttattttttttttttttttttattttcgttttttttttttgtttttatttttgattttttttttttggttttattagaaaaggattaattttattagttttgtttttttttttttgttttaataattttgttaagataatttttttaaagtataaggttaatgagaagggggaaagtcggtttagaaggtagtcggttcgattattttgagtttgaatttatttttggtggttttgttaaaatatagtttgaagtaaattatttgtttttatgtttttaatgtttattttgtcgaaagtttaaatttttttgtttggtatttaaggagattttaagtttttaaaatttttttttgatttttatgtaagttaaacggatttatttattgtattttaaatagtttttttatatttttttttttgtattttttgataatttttttgtgtttggaatattttttgtttttatttaagttttattattttttaagatataaaatatgtgtgatttttgaggtttttgtgaattgtttttagtatttattaagtaattaattttgtttttgaatttttatagtataaatttattcgtttatttgatatttaataaatattaatttttattatttattttttttttttttttttttttttgagatggagttttgttttgttatttaggttggattgtagtggcgcgattttcgtttattgtaatttttgtttttcgagattaagcgatttttttgttttagttttttaagtggttaggattataggcgttcgttacggggttcggttaatttttgtatttttagtagagataaggttttattattttggttaggttggtttcgaatttttaatttcgtgatttatttattttagttttttaaagtgttgggattataagcgtgagttatcgtgcgtagtttattatttatttttttatgtttatatttttttattgtttgagatttttttttatttagggttaagtattgagtttattagaaattttattgtatatgatttgatgaagatgagattatttttttaaaagttatatattaaattttttaagttaataatattggtaattaatttaaattaattgagtgattattatgtttaaggaagttttttttttggtaggttgggaagcgggagaagggaaggatataattttataaaaaaaaaaaagttgtagaagggaaggatataattttataaaaaaaggtttttgtttataaggagttaattatttattggttagagaagaaacgtgttttttttttgtaatggttgtgtttttgggtttagttaatttaattttttatgtttttaatttatgagatcgtattaaaaacgtttttgttatatttttgtgggaaagtaggtgagttagaatgagtgtataatatataagtatatattttaatgataatgaatgtgtagattaataaatttaaattttgtttttgtttttttgagagttttgttttgtcgtttaggttggagtgtaatggtatgattttggtttattgtagtttttgtttttcgggtttataggattgttttgttttagttttcggagtagagtagttgggattataggtgatcgttattacgttcgattaatttttgtagtttttagtagagacggcgttttttatgttggttaggttggttttgaatttttgattttaagtgatttattcgtttcggtttatttaaagtgatgggattataagcgtgagttatcgcgtttagttaaatttaaatattttaaaagcgtagagtaatcgttttttttttcgttaacggtaattagtattttcgttttttaattagaatagttgtatgtatcggtgtataagtttgttttaagtgttatttttaattttttttaaaaataggttttaaaataatttatttgggtataattttagcggttggtggagtgggtttaatatattaaatagttgttaattttggtttttttttggtaatagcgatacggagattcgtatttgtcgtagtttttatcgcgggcgggaagtgtaaatataagaaatataaatatagcgtaacggttaaaggagtgttatagcgttaaattttgttggtttcgcgttaggtcgagttttatttttttagttcgcggttaatatttttatttcgttttatagttcgtcgcgttcgcggggcgatattttttattttattatttcggaggtggtgcggtcgagtttcggatttaattggcggaagcggggtcggttgtgtgcgcgcgtataaatgttcggatgcgtcgcgacgattcgcgcgtttttttcgggcggtagggggcgcgtatcgaggtatcgcggcgagtttggttgtttttggggtttgtgtggttttgtgtgtcggaaagatggagtaagaagtcgagttcgaggggcggtcgcgatttttttgatcgagattttgttgttttcgtagttaggagtatcgttttttttcggattagtgcgtacgagcgtttagtgttttggttcggagagtggaatgattttcgaggtttagggcgtcgtgttttcgcgcgtttcgtgaaggaaattggggagttttgagggattttcgattttaagcgcgaaaatttcggatggtgaggagtaggtattggttcggtagcgagcggttatttttgggtttgggttttgacggtgttttttttatcgttggtttttagtttttgttcgttcgtagtttttgtgcggttcgtggttgggggttcggggcgcggggcgcggggtatggggtacgtggttttgcggaggttttgttggattggggttaggtagtcgtcgttagggaggagggcgggatttcggacggttttcgcggcggtgggggtgggggtggttcggaggttttcgcgggagtttagggtaaaggttacgggggtcgggggttgcggggtcgtttcggcgcgggaggttcggatgatcgtaggtgtttgtcgggttattagtgtgaacgttgcgcgtagtttgggcgggattgggtcggtttagtgggtaggttgatttagtttttttttttgagttggttaagtttagatacgtttcgaaattgtagtaaaaggagttaagttttgatttgtttttagttggggttatttaaattatgtatttttttagttgtgtttagtggcgattggagggtagatttgtgggtacggacgtacgttattttttttttgttgatttaggtaagtatcgatttgtttgtagttttagttttaattgttgtttatgttttttatatatgatgtattttttatagatgttttatgatttttagtttttatcgtgttttttttttttttgtagg

SEQ ID NO: 104 - DNA, 6018 bp, Artificial Sequence
  chemically treated genomic DNA (Homo sapiens)
tttataaggaaaaaaaagatacgatgaaaattggaaattatgaaatatttgtggaaaatatattatatataaagaatataaataatagttaaaattaaagttataagtaagtcggtgtttatttggattagtagagaaaaagtggcgtgcgttcgtgtttataggtttattttttaatcgttattgaatatagttgggaaaatgtatggtttaaatagttttagttggagataagttaggatttaattttttttattgtagtttcggaacgtgtttgaatttgattagtttaagaggaaaagttgagttaatttgtttattgaatcggtttaatttcgtttagattacgcgtagcgtttatattagtgattcgataggtatttgcgattattcggatttttcgcgtcgaagcggtttcgtagttttcggttttcgtgatttttattttgaattttcgcggagattttcgaattatttttatttttatcgtcgcgagagtcgttcgaaatttcgtttttttttttggcggcgattgtttagttttagtttaataaaattttcgtaaagttacgtgttttatgtttcgcgtttcgcgtttcgagtttttagttacgaatcgtataaaggttgcgaacgggtagaggttgggaattagcgatagaggggatatcgttagagtttagatttaaaagtgatcgttcgttgtcgggttagtatttgttttttattattcggggttttcgcgtttggagtcgggggttttttaagattttttagttttttttacggggcgcgcggaagtacgacgttttgggtttcggggattattttatttttcgggttagggtattgggcgttcgtacgtattaattcggggagggacggtgtttttggttgcgaaagtagtaggatttcggttagaggggtcgcggtcgtttttcgggttcggttttttgttttattttttcgatatatagggttatataggttttagaagtagttaagttcgtcgcggtgtttcggtgcgcgttttttatcgttcgaggggagcgcgcgggtcgtcgcggcgtattcgggtatttgtgcgcgcgtatataatcggtttcgttttcgttaattgggttcggggttcggtcgtattattttcgggatgatggagtggggggtgtcgtttcgcgggcgcggcgggttgtgaggcggggtgggggtgttggtcgcgagttgagagggtggggttcggtttggcgcggagttagtaaggtttggcgttgtgatatttttttagtcgttgcgttatgtttgtattttttgtgtttatatttttcgttcgcggtggaaattgcgataaatgcggattttcgtgtcgttgttattaaaaagaaattaaaattaatagttgtttaatatattaagtttattttattagtcgttggagttgtatttaaatgagttattttaaggtttgtttttaaaaaagattaaaaatagtatttaaggtaggtttatatatcggtgtatatagttgttttggttggagaacgaagatgttggttatcgttggcggggaggggagcggttattttgcgtttttagaatgtttgggtttggttgggcgcggtggtttacgtttgtaattttattattttgggtaggtcgaggcgggtggattatttgaggttaggagtttaagattaatttggttaatatgggaaacgtcgtttttattaaaaattataaaaattagtcgggcgtggtggcggttatttgtaattttagttattttatttcggaggttgaggtaggataattttgtgaattcgggaggtagaggttgtagtgagttaagattatgttattgtattttagtttgggcgatagggtaagatttttaaaaaaataaaaataaagtttgggtttgttaatttatatatttattattattaaaatatatatttatatattatgtatttattttgatttatttatttttttatagagatgtggtaaaaacgtttttgatgcggttttataaattgaggatataaagaattgagttagttaaatttaaaaatatagttattgtaaagaaggaatacgttttttttttggttagtaagtgattagttttttgtgaataaggatttttttttataaagttatattttttttttttgtagtttttttttttttataaagttatattttttttttttttcgttttttagtttattagaaaggaaatttttttaaatatagtggttatttagttgatttaagttgattgttaatattattaatttaagagatttaatatgtggtttttaaaaagataattttatttttattagattatatatagtggggtttttaatagatttagtgtttgattttggatgaaagaaaattttaagtagtgagaaaatgtaagtatgaaaagataagtgataggttgcgtacggtggtttacgtttgtaattttagtattttgggaggttgaggtgggtggattacgaggttaggagttcgagattagtttggttaagatggtgaaattttgtttttattaaaaatataaaaattagtcgggtttcgtggcgggcgtttgtaattttagttatttgggaggttgaggtagaagaatcgtttgatttcgggaggtagaggttgtagtgagcggagatcgcgttattgtagtttagtttgggtgatagagtaagattttattttagaagaaaaaaaaaaaaaaagagataagtgatagaggttgatatttgttaaatattaagtgaacgaatgggtttgtgttataaaagtttagagatagaattaattgtttagtaaatgttggaggtagtttataaaggttttagagattatatatattttgtgttttgaaagatggtgagatttaaataaaagtagagaatattttaggtataagaaaattattaaaaaatatagaaaggaaaatataagaggattgtttgagatataataaataaattcgtttgatttgtatgaaagttaagaagaagttttaagaatttggagtttttttaaatgttaagtaaggaaatttgggttttcgatagagtagatattagaagtataaaaataagtgatttgttttaaattgtattttaataggattattaagagtagatttaaatttagaatagtcgggtcggttgttttttggatcgattttttttttttttattggttttgtgttttgaaaaaattattttgataaaattattagagtagaaaaaaaaaggtagaattgataagattagtttttttttaatggaattagaaaagaagggttagaaatgaaggtagaagggagaagcgggggtgggggagagagagagaagtaaaaaggatttatttaagaatttggtatttaaaattacgtgtattagtattattatagtagtatgatttagtgtttatttaaagtatgatgatattgtttattaaaaaaagtttggagggaatgaaaagttgggttagttttaagttatgggttatagaatagaattcggtggtaaaaagtttaggttgggaatagagtttgaaatagtaaaggaatgagaggaacgattaaaaagttaaggattatatagtgatgtttgaaaaattagaattaggtaataatattgaatattgtaaaagttagagaaaatgtggaaataagaaagtaagcgatttggaaagtggcgagtaagatggaatatgaggaggttgttgagagttgggaggagacggtagatagcggggaaatagacgtttggaaaaaaaattgaagattatatagaaagtaggaaatttaaattttttaaagtgtttattgtgatttaggatgataattttttttcgggattttttttataggttcgtatttttaagaggtttattagtaacggtgtggttagtagttttaagttcgttagtaggttcgtttttttagttaagtttttggtatagtgggaagtcgagtatatcgaggttaggaagcggattttgggtagcgttaattcgaggagaagtaggagaaatttattttcgataggtttttttttgatttttttttttttaggttaattaggattttttaattcgaagatagtagatagtttaataatgtgattagatagtttttgggttttgatgggttatacggttttaaatagcgtagataaatgtaggtaagaagagatggcgcgattgtcgcgttaacgcgttttgggtcgttcgttaagggttgtattatcgtggtagatagttggatttgagtagcgggaatttgatttatttgtttggtgattttcgttgtttcgtttattgtgattttgaattttatgtattgtgatttttttttttttttttttttttattgtgattggtattttgataaggattgttttaagttaatggaaagggaaaaagggtgagggttaggagaaggttggggggaatttattaattatttagagtagagagttagatagggttagtaatagcggtttattatgtttattaatttgggattttaaaatataaatgaatttatatttatttatttttaagtgtatgttattatttaaaaagtgagttttatttgaaaaaaaagaaagtaaattatttgtttattttaaaagtagttgttgttgtttgtgattttgttatttaaaaaaatatagattagttgttgttgtttgtttgtattttatagttattttgtgttattttgttttttgttgtgtttatttgaagtttttttagaggtaaattgtttatttttagtagcgttgtttttgatgtttaagaggtgttttaagaggttgagatattttgagtgtttttatattttttgggatttaaattttgtaaataaggtttatatttgtaattttagtattgtgggaggttaaggttggaggatttattgaggttaagagtttgagattagtttgagtaatatggcgaaattttgtttttataaattgtaaaaaaaaattagttaggcgtggtggtatttatttatagttttagttatttgggagttagagttgggaggatggtttgagttcggataggttgtggtgtgattttgttattgtattttagtttatgtgatagagtgagattatgttttaaggggaaaaaaaaaagtttataatagatttattttgatttaagggttatttcgtatttgtatttattagttataattaattttttgttttttttttttttttttttttgagacggagttttattttgttatttaggttggagtgtagtggtacgattttagtttattgtagtttttattttttgggtttaagtgatttttttgttttagtttttcgagtagttgggattataagtttgtgttattatattcggttaatttttgtatttttagtagagacgggattttattatgttggttaggttggtttcgaatttttggttttaggtgatttattcgttttatttttttaaaatgttgggattataggcgtgagttattgtgtttggttataattaatttttaaagtatggtgaaaattaaataagatttagtttagaaatcgtgtttagaatgttgagttttataatatttatgagattatttaaaattatagaagtagtttaaattttttatgtttttttaaatatttggaattgaatagtgttatttaaaaggtaaaattcgggtcggacgtagtggtttacgtttgtaattttagtattttgggaggttaagataggtagattattgaaggttaggagtttgagattagtatgtaaaatttcgtttttgttaaaaatataaaaattaggcgggtatggtggtgtaagtttgtaattttagttgttcgggaggttgaggtagtagaattttttgaatttgggaggtagatgttgtagtgagtcgagatcgcgttattgtattcgagtttgggcggtagagtaagattttgttttggaaaataaaaaagtaaa

SEQ ID NO: 105 - DNA, 5908 bp, Artificial Sequence
  chemically treated genomic DNA (Homo sapiens)
gttaagtagaggagagtttttttagattggtttttgggttttttagatatgattatagtaggtttttatttttatgtttttagagtatttttgtttgttgatgtgataaaatgttttagggttattttgtaggttttttgtttcggatttggaatttattatttttataaggaaatttaattttttttaatggaaaatggtttttaaggttataatttaggatgtaaggatatttataattatggggtaaatttaaggtttttttagtggatatataaggaaatttgttttattttaaattttgaaagataatatattatgagtttattttgatatttttagtatagaatttattgaatgttataaggagttagattttatttttgatgtttgatgttcgattgttggtggttttaaagttttatttttttttttttttattttttaattttatatttgggtaaattaataagaaagttttagttttttttttaatttatagaggttttgttattagtttttaataggttttagttttaattataagttagatttttttttgtttttttaggttattttatatttttttgggaggtttatttgttgttttaaagagtttaattatgtgagtaataattttttttatattttttgggtggatgtgtggtattattagttttgatatttaaattaaattttgggtggggatttttttttgtttttgtatagtggttataaaatataattttttgattttatatttttttttttttaggttaaaaaaattttatttttagtgatgtttaaataatcgtttatttgttttattttattataatatataggtttagaaaaatattaatattattattaatataatttttggaaattgattaattttggtttttagtttattttatttttagagaatgtttgtttagagaagtatttttatattggtgtgtttaaaataattaaattatttttttttatggagttatattgttgtatgatatatagttgtattttaatttttatttttagggttttttttttttgtttttattgatttaattggttttatatttatgtaaatatttataaggtttaaaagttaagtttattaaagaagatagtttagagaaattgggtttttatttttatttttttttttttttatatttacgttgtatggtttatttttttgtagtttttttttaataaaagtagatgtgtatatatatttataagtttatattttttgatgttatgttttgttttattgtttttttttaaagttggagagttgagatttatgttttggtttttttttgtttaggtggttaatttgtgtgcgggtaggtgggttgatgtagaattttttgtggttggagtaggtttttatcggttaaggtatatttaggttgattttttttttggaggttttataatatttgttttaggagtggtttatttagttataaagtttatttttttttttttttttaggaagtcgatatagttggttaatatgttaaaatttgattttattaaaagtattatatatatatatatatatatagtaatatatatattaattatatatagtatatatattttatatataattgttatatatagtatatatattatatataattattatatatatagtatattatatatatatatatatattatatattatatatagagagaggatattatatatatatatatatatatatatatatatatatatatatagcgatagtatattatatatatatatatatatatatatatatatatatatatatatatatatatataatatatatatatatataaattgtgcgtggtggtttatatttgtagttttagttatttagggggtcgaggtaggagaattgtttgaatttaggagttagaggttgtagtgagttaagattgtgttattgtattttagtttgggtgatagagtgagatttagttttaaaaaaaaaaaagtgaaattttatttttattaaaaatataaaaaaaaaaaatagttgggtttagtagtagatatttgtaattttagttatttgggaggttgaggtaggagaatcgtttgaatttgggaggcggaggttgtagtaagtagagattgtattattgtattttagttcgggggatagagtgagattttattttaaaaaagaaaaataataatagtaataatagaaaagaagtaatttaaaatgttttaaagaagtaatttaaaatgttttttttttttttttttttttttttttttttttttttttttttttttttttttttttttttttttttttttttttttttttttttttttttttttttttttcgttttttttttttgttttttttttttttttattttttttttttgatggagtttcgttttgttgtttaggttgaagcgtagtggcgtgattttggtttattgtaattattgtttttcgggtttaagtgatttttttgttttagtttttcgagtagttgggattataggcgtgtgttattatattcgattaatttttgtatttttagtagagatggggttttattatattggttagtttggttttgaatttttgattttatgatttatttattttggttttttaaagtgttgggattataagtatgagtttttgcgtttggtttagtattttttagttttaattaggttgtatttatgagggtggaagaattgtttttggaaataagtagtaattaggatgagaaaagttgtgttttatggggttatgtagtggtgggttttgtttgatcgtttaatgggggaaaatatggaaatttatgttttttaaaacgtttatataatagtattttcgtattgaatttttttacgttagatttggtttatataatttagagttgttgttttgtgtttttatgttgtttttttagtttttttatttttattagtagttgatatttttgtagttgttttagagtagagggtttagtttttttaattttgtggtttttttatatttttaagaattattgagaattattaggaatttttgttaatgtggatgggttatatttagttatatttatatatttaaagttagggttaaggaatttaaaaatatttatttattgatttattttaagatagtgatgtatttattttatgttaatattaataatttatttttatggaaaaaaaataataaaatgaaaatagcgttttagtttatatttttgtaaatttttgtaatatttggttgaaacggagatagtgggagtttttttattgtttttgtatttgtagaattatattttatatttttgggagtatgagaatgagaagggtaagtaatatagagggttattagataaatggttttgattttatggattttttgaaaggaataggaagtttttaggggttttttgtatcgaggtttttttgattaagggagttaagttttaagggttgttggggagttggaggaggtgagatggggtagagaggtcgttgttattaaaagcgtgtttaggttttatttattttattttaggtggtttattgagtttatatggttattagcgtaattgaagtagatttcgatagaattttgtgtagaattattttaggatttatttattttggtatgtataagttattttaattgaagaatgttttttaataataaaatattgtaaatttaagtatgtggtaatagtaatgattaagtaaattatggtttttcgaagtttagtgttttgtagttattagagagtaaaagcgagaatgtgtttagtggagatagttttaggatatttaaaagtagagagtataaagtatagaatcgtgttgtgtatgttatgatttttttttttgtgtttttgaaaaagagaatatacgtatagtaggaaaagatatattaaattattttatataattggttgtttttgtgtttggtaagatgtatgtattgaagaggaaggtttcgattttttttttttttttttttttttttttgagatagggttttgttttgtcgtttaggttggagtgtagtggcgcgattttagtttattgtagtttcgatcgtttcggtttaagcgatttttttattttagttgttttagtagttagaattataggggcgttattacgtttggcgaattttttgtagagatgggttttttttaggtggtttaggttggttttgaattttcgggtttaagggatttttttgttttagttttttaaagtgcggggattatcggcgtgagttatcgcgtttcgtttgtttttaatttttagtagttttaaattttttggtaatgagtaatgttatagtgttttagatgtttggttttttaagaaaaggatagtaggacgggttatttcggtgggagcgtgttttatttttgtttttcgttagtcgttttcgtcggggatgtatttaggtattttttttcggatgcgtgagtggttcgttcgcggatacgttagtttcgtttcgcgagttcggttttttcgtttttttttcgtttacgttttgcgttttttttttattggttttatgtcgcgttttttcgtttaatcgtagcgtttagcgttagaatttgaattttcgttttcgtttgaattgggcgggcgcgtcgggttggaagaaggaagtggagggttgacgttgcgggcgggcgggcgggcgggaggattcgattcggtgggagtcgttagagtcgggcgttcggggacgtagtttgtagggttatcgggttttcgttagaggcggcggcgggagtagcggggattgtaggtcggggtgtagcgaacgtttttcgcgggttgcggttcggtgtgtgcggagcgtggcgggcgtagtttatcgggtcgaggtgagcgcggcgtcggttttttttgcggcggattttgggtgcgatttgacgagcggtggttcgataagtggttttgcgggtcggatcgttttaggtgagttgcggtcgggatttttgggagttgttcggggtcgagggttgagtcgcgtgttattggttgtaggtaggcgtttgaagatattgtgcgttttcgggtgtttttatagtgggtatttttggttattggggatatagagaatgaaggaaggaagttatatatttgttttttggttttttgtggtaataggaaaatgggatagaaagtttttttgtttggaattcgagaacgtttttttttatattgttgttttgtttggtggtggtaataattttgtttttgtataataggtatagttgttgatagtgttttattagtttttgatatgtgttttattagaggtttgagaaggggggttatttttcgtgtggttattttttagattatacgggatttaggttttattttgtttttttaattttatttcggttttattttgtttttttaattttattttttattttgtttttttcgtttaaggtattttaagtttttgtttattttggtattttttatatatttggaagtttataatgggaaagttttttttttttttaagtttgtgtgatttttattatttaggtattaggtgaaatgttatttttgaggaagttttgtatgaaaatttgtatttttaattttatagttttaggggtgagttgtgggtttgttttttattaggttgagttttttaaaggtaaagattgttttgttattaattacgtgtgtagggttagggatggtgtttggtatagggggtgtgattaatatttagtattttggtaagggttagtagaaatatgggttggagttatggatttgtaattttttgagaatagtggtttttataggagggttatttaattttttaggatttatttgaatttttatgttata

SEQ ID NO: 106 - DNA, 5908 bp, Artificial Sequence
  chemically treated genomic DNA (Homo sapiens)
tgtgatatggaaatttaaatgaattttggaaggttagatgatttttttgtgagaattattgtttttaagagattgtaaatttatggttttagtttatgtttttattgatttttgttagaatgttaggtattgattatattttttatgttagatattatttttggttttatatacgtgattagtaataagatagtttttgtttttggggagtttagtttagtgggagataaatttataatttatttttgaagttgtggggttggaaatataagtttttatgtaaggtttttttagaggtgatattttatttgatgtttgaatgatggaaattatataagtttgaggaaggggagaatttttttattgtaaatttttaagtgtgtaagaagtattaaggtgaataaaggtttggaatgttttaggcggaaggaataaggtaggggatggggttgggaggatagggtgaggtcgggatggggttgggaggatagggtgaggtttgaatttcgtgtggtttgggaaatgattatacgggaaatgatttttttttttaggtttttagtgggatatatgttagaggttgatggggtattgttagtaattatatttgttatatagggatagggttattattattattaaataggatagtaatataagaggaaacgttttcgaattttaggtaggaagattttttgttttatttttttattgttataaggagttaagagataagtgtatggttttttttttttattttttgtgtttttagtggttagggatgtttattgtggaggtattcgggggcgtatagtgtttttagacgtttgtttgtagttagtgatacgcggtttagttttcgatttcggatagtttttaggagtttcggtcgtagtttatttgggacgattcggttcgtaaggttatttgtcgaattatcgttcgttaagtcgtatttaaagttcgtcgtaggaggagtcggcgtcgcgtttatttcggttcggtaagttgcgttcgttacgtttcgtatatatcgggtcgtagttcgcggggggcgttcgttgtatttcggtttgtagttttcgttgttttcgtcgtcgtttttgacggggattcggtggttttataggttacgttttcgggcgttcggttttagcggtttttatcgagtcgagttttttcgttcgttcgttcgttcgtagcgttagttttttattttttttttttagttcggcgcgttcgtttaatttaaacgaaaacgaagatttaaattttggcgttaagcgttgcgattgaacgggaaagcgcggtatgggattaataggaagggagcgtagggcgtgggcggggagggggcggggaaatcgggttcgcggggcggggttggcgtgttcgcgggcgagttatttacgtattcggaggaaaatatttgggtgtattttcggcgagggcggttggcggagggtagaggtggaatacgtttttatcgagataattcgttttgttattttttttttaaaggattaaatatttgggatattataatattatttattgttagaagatttaaaattgttaaaaattaaaaataggcgggacgcggtggtttacgtcggtaattttcgtattttgggaagttgaagtaggaagattttttgagttcgggagtttagaattagtttgggttatttggagagaatttatttttataaaaaattcgttaggcgtggtggcgtttttgtagttttagttattgggatagttgaggtgggaggatcgtttgagtcggggcggtcgaggttgtagtgagttgagatcgcgttattgtattttagtttgggcgatagagtaaagttttgttttaaaaaaaaaaaaaaaaaaaaaaaaaaaatcgaaatttttttttttagtgtatatattttattaaatataaaaataattaattatataaagtagtttggtgtgtttttttttgttatacgtgtatttttttttttaaaagtatagaaaaaaaggttataatatatataatacgattttatattttgtgttttttgtttttaaatattttgaggttatttttattgaatatattttcgtttttattttttgatggttgtagagtattgggtttcgggaaattataatttatttaattattattattgttatatatttaggtttataatgttttgttattagaaaatattttttaattgaaatggtttgtgtatgttaagatgggtgaattttaaaataattttatataggattttatcggggtttgttttagttgcgttggtggttatgtgggtttagtaggttatttggggtgaagtgaatggagtttaaatacgtttttggtgataacggtttttttgttttattttattttttttagttttttagtaatttttggagtttggtttttttgattagggaggtttcgatgtaggggatttttgaggattttttattttttttagagagtttataaggttaaaattatttatttaatgattttttgtgttatttgttttttttatttttatgtttttaagagtgtggggtgtggttttgtaaatgtagaagtagtgaggagatttttattgttttcgttttaattaggtattatagagatttgtaaaaatgtgaattaaagcgttgtttttattttgttgttttttttttataaaaataagttattggtgttagtatgaaataggtgtattattattttaaaatgaattaataaatgaatatttttaaattttttagttttaattttaaatatataaatatagttagatataatttatttatattaataaaaatttttggtggtttttaataatttttaagagtgtaaagggattataagattgaaaagattgagttttttgttttagagtaattataaagatattagttgttgatggaaatagagaaattgggaaagtaatataaaagtataggatagtaattttaaattgtatgggttaagtttgacgtagaaaaatttagtgcggggatattattatataaacgttttagggggtatgagtttttatgtttttttttattaaacgattaaataaagtttattattgtataattttataaaatataattttttttattttaattattgtttgtttttagagatagtttttttatttttatggatgtagtttaattagaattagaaggtgttaggttaggcgtaggggtttatgtttgtaattttagtattttgggaggttaaggtgggtggattatgaggttaggaatttaagattagattgattaatatggtgaaattttatttttattaaaaatataaaaattagtcgggtgtagtggtatacgtttgtagttttagttattcggaaggttgaggtaggagaattatttgaattcgggaggtagtggttgtagtaagttaaggttacgttattgcgttttagtttgggtaatagagcgagattttattaaaaaaaaaaaatagaaaagagagagagatagaaagaaagaacgaaggaaagaaagaaagaaaaagaaagaaagaaagagagagagaagaaaaagagaggagaaaaagaaagaaagagagaagaaaaaggaagaaagaaagaaaaatattttgagttatttttttgaaatattttgagttattttttttttgttgttgttgttgttgttttttttttttgagatgaagttttattttgtttttcgggttggagtgtagtggtgtaatttttgtttattgtaattttcgttttttaggtttaagcgatttttttgttttagttttttaagtagttgggattataggtgtttgttgttaagtttagttattttttttttttgtatttttagtggagatggggttttatttttttttttttgagattgagttttattttgttatttaggttggagtgtagtggtatagttttggtttattgtaatttttggtttttgagtttaagtaatttttttgtttcggttttttgagtagttaggattataggtgtgagttattacgtatagtttatatatatatatatattatgtgtgtgtgtatatatatgtatgtgtgtgtgtgtgtgtgtgtatatatatagtatattgtcgttatatatatgtatatatgtatatatatgtgtgtatatatatagtattttttttttatatatagtatatagtatgtgtgtatatatatagtatattgtatatatagtaattatatatagtatatatattatatataataattatatatagagtatatatattatatataattagtatatatattattatatatatatatatatatatagtatttttagtagaattaggttttaatatgttggttagttgtatcgattttttggaggagggagaggaggtgagttttgtgattggatgagttatttttggagtaggtattgtgaagtttttagaagaggaattaatttggatgtgttttgatcggtgaagatttgttttagttatagggggttttgtattagtttatttgttcgtatatagattaattatttggataaaagggaattagggtatagattttaattttttaattttagagaaaggtagtgaaataaaatataatattaaaaagtatgggtttatgagtatatatgtatatttgtttttattaaaaagaagttataggaagataaattatataacgtaaatatggagaagggaggggatagggatagaagtttagtttttttgaattgttttttttggtagatttgatttttgagttttataaatatttatataaatataaaattaattaaattaataaagataaaaagaagaaattttaaaagtagaaattaaaatataattgtgtattatgtagtaatatagttttatagagaggaataatttagttattttaaatatattaatgtaagggtatttttttagatagatattttttgaggataaaatgaattgaaaattaagattaattagtttttaagaattgtgttggtagtgatattgatgtttttttgaatttatatattatgataggatgaggtaaataagcgattatttgaatattattaggaataggatttttttagtttaagaaaaaaggaatataaagttaaaaagttgtgttttgtggttattgtgtaaaagtagaagggggtttttatttaaaatttggtttgggtattaggattgatggtgttatatatttatttagagggtatgggaagggttattatttatataattgagttttttggggtaatagataggttttttaagagggtgtgaaatggtttgagaaagtagggaaggatttggtttgtggttagggttggggtttgttgagagttggtggtagggtttttgtgggttgaggaagaagttgaagtttttttattagtttgtttagatgtggggttggggagtggggagagggaaggatgaggttttaaggttattagtagtcgaatattaaatattagaaatggagtttgattttttatggtatttagtaaattttgtattgagaatgttaggatgaatttatggtgtattattttttaaaatttaaaataaaatagatttttttgtatatttattgaagaggttttgaatttattttatagttatgagtgtttttatattttagattatgattttgaaaattattttttattaaaaggagttaagtttttttgtagaaatggtggattttagattcggagtaagaaatttataggatgattttggagtattttgttatattaataagtaaggatgttttaaaaatataaaaataaaaatttattgtgattatgtttgaaggatttaggagttaatttgaagagatttttttttgtttaat

SEQ ID NO: 107 - DNA, 15732 bp, Artificial Sequence
  chemically treated genomic DNA (Homo sapiens)
aagagagaaataaaaatgaaagttcgattttaattatttaatttaggtgaattttttgtatgttcgattgtatttagtttagtttaattaatatttattgattattttaatttatgttaggaaattgatgatataaagaagataaataattaatgatgattttagttattgatgttttaatatagagggggtatataaataagtgaaaagaaaattttaatgaaatgtagtaaatgttaagatataggaacgtgtagagtattatagaggtatttaaaggtgatttgtgataggtatggatagtttttaaaggaagagtgagttttaatataattatttgaagaaaatgtggatagtagagtagaaaatgtatgaggggaattttaggatgagagaagatgattaaatttattaagttatgaaataataatatgtgtgaaataatattatgtgttagagatatggagaaattaaattgttagttggtatagtaggataagtagagaaaagatagagattagtaagaaatgaggttagagaaataaagatatattaggttatgaaggtttttgagtattaaataaagaattattttatttaatgagtaatgtatgtaatgttggagaatttaaagaagtgaaattaagtgattaatgagttagttagaatagttttagttttaggtaatataaatttttaagttaaatgatttaaaaagtaggaaatttataagaagattttttgtttggggagagaagagggatgttagttaatttattgatttaataatattttttatgaaatattttttttattgtatttaatttaattgttttagtttattttaaatgaaaatataaggatagttggaataaataataagttattttttttagtttatgttttttgtttagtaaagaaaattttttttagatatttttttattgtaggtttttatttagatattagtggttaaaattgggttatatgtttatttttaattaattgtttaaaaaggatttagtttttttgattgatttaagtaaataattatttattttttggagttgaaaaatattagtattttataaatattttgataattaatatttgagatggaagggagtattgtgtgagtaaaatataaatagataattatagaatatgttattatttattttttgtaatatattttttgaaatgttgtagggtagattttagaattttaggttggaagaaaggaggtgagttagaatagtaatgattttagtaagagatagtgagaatttgaattagaaaagtgggaaataaatatttgggaaatatttatgagataaaattattatttgagttagtagtttgtgcgttgtttggtggagaattaatagagggtatcgttataaaagttagtttttaaaaaagggtatgtattagtttatttttattttgttgataaaggtatatttgagattgggttttttattaaaaataagaagtttattggatttataattttatatggttggggtggttttataattatagtagaaggtaaggaagcgtaagttatattttatatggatggtagtaggtaaagagagagtttatgtagggtaatttttattttttaaaaatcgttagattttgtgagatttatttattattatgagaatagtatgggaaagatttatttttataatttattttttttttattgggttttttttttaatatgtgggaattgtgggagttataagatgagatttgggtggggatatagagttaaattatattattttatttttggttttttttaaattttatatttttatattttaaaatttattatgtttttttaatagttttttaaagttattaatttaaaagtttatagtgtaaagttttatttaagataaggtaagttttttttatttatgagtttgtaaaattaaaagtaagttagttattttttatatataatggggatataggtattgggaaaatatagttattttaagtgggagaaattggttaaaataaaggagttataggttttatgtaagtttaaaatttagtggggtagttaaattttaaagttttaaaatgattttttttgatttttttttatatttaggttatattgatgtaagaggtaggtttttatagttttgggtagttttatttttgtggttttgtagggaatagttttttttttgattgtttttataggttggtattgagtgtttgtggtttttttagttgtatggtgtaagttattagtgtatgtattattgtggggtttggaggatgatggttttttttttataattttattatgtggtgttttggtagggattttgtgtagggtttttagttttacgttttttttttgtattgttttagtagaggttttttattaggatttcgtttttatagtaaatttttgtttgggtatttagtagtttttatatattttttgaaatttaggtagaggtttttaaattttaatttttgatttttttgtatttttaggtttaatagtatgtggaagttgttaaggtttgaggtttgtattttttgaagttatggtgtaagttttatagtagttttttttagttattgttgaagtggttgggatgtagggtattaagttattaggttgtatatagtatagggattttgggtttggttcgtgaaattattttttttttttatatttttaggtttgtgatgggattggttgttatatacgtttttgatacgttttggagatattttttttattgtttttatgattaatatttagtttttttttatttatgtaaatttttgtagttggtatgaatttttttttagaaaatgggatttttttttttattgtattattaggttgtaaattttttaaatttttatgttttgttttttttttaaaattgaatgtttttaatagtatttaagttatattttgaatgtttttttgtttagaaattttttttattagatattttaaattattttttttaaattttaagatatatatttttaggttaggggtaaaatgttgttagtttttttgttaaaatataataagagttatttttgttttagtttttaataagttttttatttttatttgagattattatagtttggattttattgtttttgttattattagtatttttgttaaagttatttaataagtttttaggaagttttaaacgtttttatatttttttgtttttttttgagttttttaaattgttatttgttatttgttatttagttttaaagttgtttttatattttttggtatttttttagtaatgttttatttttggtattaatttattttattagtttgtttttatgttgttgataaagatatatttaagattgggtattttataaaagaaagaattttattggatttaatgttttatatggttggggaagttttataattatggtggaaggtaaggaggagtaagttatattttacgtagatggtagtaggtaaagagagagtttgtttagggtaatttttattttttaaaaattattttaaaacgattagattttatgagatttatttattattatgagaatagtatgggaaagatttgtttttataatttatttattttttattaggttttttttataatacgtgggaattatgggagttataagatgggatttgggtgggaatatagagttaaattatattagggtagaaagttgttttgaaatatggtaatttttgtcgtgagtttttttggtttttaaatattgaagtggggtatttgataaggtttttttgtgtttttttttattttttattttaagatttgttcgaagtattagtataagagagaaattgaaataatgaatatttatatgtgttagtggttgttattttagatttttttggttttttttgatttattttgttttagtggggtttagatagtttttaaatttaaattttaattttttttatgttgttggtttggattaagataattagttttatttttttttgtagatggttttggattatttttttttattagttgttttgggatttttttttagttatgattatattttgtttatagattagttagttggtaattatagtattgtttgttaattgatattatttatttgataatttagagttatgatattttgtagtgtatttattgttttttataggaaaaaaaaattgtagtataaagggtttattaggttttttattattttagagttttagtgttgttttagaatgtttaaggttttagttatgatatgaattaattatttataaataatgtaaaaagtatgagtaattatgaatttaataattaaggtaaggtagtttagttattatatttaagagagtaattagtatgaaatttttttaaattatttgaataaggatttatatatttataatgattttttgtttttgttaagttttaggtgtattagttattaataattgggtgaatatgtaggtattatttaaataaaaataattttatagtagatttatttttatttaagagatgaagttaagttttggtagtaatagatatttttattaagattttttgtttttgttattttgtgaataggaaaggagggagaaattttggtgttttgttttttttaatttatattaagatttttatttaagcggttatcggtttttaatgatttatatgtaagttagttttataagaaagttttgagtttgaaattttttttagtaagtatttgtaagttaaaaaagcgaagaagaggtattatttattgttatttttttttgtgattgagattatttattataaagaggaattgattattttttttgatatttgaaatagaaagttataaaggttgataggcgtggttttaaaattgttttatgattatataatttttttttagttaggaattaggatagtgtaagaaggttatttataattaagattgagagtggttttaataagtgttatttttttttgttagtttttattttttagttttttataagattaaaatagtttgtagtttaatttttttaaagttttacggatagtgattttgttttaaataagatagtgattttaggatttttgaagattattgtggaagaagtatttattaaggtgagatttttgggaagttttttagagaaagatttaggtatttagttggtaattatattattttagtagagaataattgtttgagattagaagtgttgttattaattatatttagaaaattgagaattgaatgttttaattgtttaggtagtaaatggatattttttattttattataattggggtatgaattaaaaaaatgtattttgtttatagtaagttttaaaaattaatttttgggtgttttttggtataaattgatatttagaggagatatttggtttttttggttggaggatgatttggtgattgggtttgggtttaagttaaaagataagatagttagataagaaaattattatgaagtaatatttagtaaaaaataaattaggatataaatttttattatatgattttatttttattttaaaaagtatagatatgtgtatatattaattttttaattttataagtatttatttaaaaataatttttatatttttatgaattagttttattttatgttttattttataataagtgtaagaagaaataatttttttttttaaatggtttatgttttatttagttatagataatattttttgtggtaaggtataatgaaaagatagggagaattaattatatattttttattttgggatatattttgatttttttatggttttgtatatatgaatgttttttaattattttatgagtatttgagaagagtttataaacgttggattttaaattttatttaagtaagataaagttttttaagtaagtttgttaattatgtttgaaaaatttaaatttaaatttaagttattttttattttgtttttttagtaattgagagatgtggtgaaatttttaattttaatagtgattttgttaattttttattgtagtttttttgatttttattatatatttttatatagaatatgtatatttaagtatatatgttatgtgtgtgtttagagagaagaaaaaatttttatatgttattttataaagtaataatagattatatttataatataatttaaattattatatttttttttaagttgtatattttattattatgtagtgaaattatgtattgatatttattgatttaagtttattttaagttatattattttttttaaaaagtttttttttaagttagagtttgaagaatataatttttttagtttttttttaaatttaagtgaatttatgttttatttgtattttgttaataatatatgattggatttatttttaatttaaattgaaaatttttttttttagttgatgagtttagtttagatatgtaaattttataaaggtatatattttaatttggttttgttattttattttgttttaatttatagtatttattttgtgttttttttttttttttttttgttaagttttttatttttaaaaaatttatattttttttaaagataagttttttagtaaatttttatattttttggttttttaaatatataattttatttgttaagagtatgtttatatagtttttgtttttttttatttgattttggttttatttatttttaagatagtaaaaatattaattaaagtatttgtttgatttttttttttttttggtttttaatattttttagatttatttttttttataatgagtagttttttataaagagttgtgggtatggatatttttattgttaagtttttgaaagttttgaatataataattgtttttttttaattgtgttaagaaatatgtaatataaaatgtgttattttaattagttttaagtgtatagtttagtagtattaaatatatttatattgttgtgtaattaatttttagaacgtttttgtattttgtaaaattaaaattttaatcgttaattaataattttattattttttttttttttagagtttggtaaatattattttattttttttttttataaatttaaaaattttaattttttatatatgtttaattatatagtaagcgtgtgttttttgtgattggttttttttattttatgtttttaaagtttatttatgttgtattgtattatgtgttagaatattttttttttttagggtagaataatattttattttatgtatttattataaaatacgtaagaaattatatttttttttatttatttatttattgaaggatatttgtaatatttttatatttttttgttgtgattaatgttgtaatgaatatatatgtatatgtatttatttgagattatatttttatttattttgggaatatatttagaagtgaaattattgaattatatggtaatgttatttttaattttaagagtaagaattatattttttttatagtatttgaattattttatatttttattaatgatgtataaggttttttttttttatttatttttattaatattggttattttttgtagttatttttttgatagtattaaaaaatattattttaggagtttcgatgttttgtgtatgtatgtttttaattgttatattttattgtggtttttatgggtttgatttgtatttttttaaagattattgtcgttgagtatatttatatgtgtttattggttatttgtatagtatttttgaagaaatgtttatttaagttttttattaatttttttttttttttttttgagacggagtttcgttttgtcgtttaggttggagtgtagtggcgcgatttcgatttattgtaagtttcgtttttcgggtttacgttatttttttgttttagttttttatgtagttgggattatagatacgcgttattatgttcggttaatttttgtatttttagtagagaaggggttttatcgtgtttattaatttttattatattgtttggattttgttgttgttggagttgatttgtaggagttggttgtatattttggatataaagtatttattaaatatataaagtgtgaatatttttttttattttttaggtttttttttttattttgttaattgtgtttttgatgtatataaaaattaaatgttgttgtagtttaatttatttattttattgttgttgttgttgtttgtgttatcggtgttatgtttaagaaatttattgttaaatttaatgttatggagttttttttttttgttttattttgagagttttatagttttaatttttatatttagatatttgatatattttgagttatattttgtatatgatgtaggtaagggtttaattttttgtatatagatgttataattgtttaatagtatttttgaaaagattgttttttttgattaaatagttttgacgtttatgttaaaaattaataagttatattttttagggtttatttttatgttatttattatattttattgttttttatgtttgtttttatgttaatattatattgttttgattattgtgtttttataataagttttgaaagtaggaagtttgaaatttttatgtttttgtttttaagattaaaaaaggttatttaaagtatttttaaattttatatgaattttaagataaatttttgtgttcgtgtaaaaaatatttttgggattttgtattatagattatattgtaaattgtattgtatatgtagttttttgggtattgatattttaatagtattaagttttttaatttttggatatagatgtttttttatgtatatttgtgttttttttaatttttttaaagtgttgtataatttattattttgattaagtttatttttaagtattttattattttaagttattgtatatagaaaaagaattgtttttttaattttttttttgttcgttgttagcgtataaaaatataattgatttgtatgtgttgtttttgatttttgtaattttgttggatttgtttattaattttaagtatttatatagaatttttgggattttttatatataagattatattattagtaaagagagagaatttatttttttttttttttatttggatattttatattttttgtttattgtttatttttggtgggggggggggtgggtgttaaatttttagtattattttaaatagaagtgaataaaaaaattatttttgttttttttttgatgttttaggagtaagagaaatgtttttagttttttattattgggaataatgttagttatggtgttttcgtatgtagattttattatgttgaagtaatttttttttatttttcgtttattgagtgtttttaatatgaaaggttatttaattttgttaaatgttttatttattttttgtattaattgagatgattattttttttttgttttttattttggtaatgtggtgtattattttaattgatttttataagtgaaaaatgagtatttgtgtatttttttttattttttaggaataagagaaatatttttagttttttattattaagagtgttaattgattgttgtatggtgagttattattgtattttagggataaattttaaatggttatgatgtataaataaatttaacgtgttatataattatgttcgttagtattttgtaaaaaaaaaatgtatcgatatgtataagggatattgtttagaaaattttatttttttagtgtttttgtttggttttgtattggagtaatgttgagttatataatgagtttggaagtgtttttttttttttaaattttgaaagattttgaggaattttggttttaatttttttttatatatttggtagaatttattagtaaaattatttagtttggatttttttttattgagaggtttttgatttttgatttagttttttgattagttataatgattgttcggattttttatttttttatgatttaaaatttgtaggttgtatgtttttaataatttatttatttatttattttatttaggttattttatttattgatgtataattgtttaaagtattttttttatttttgtgaaatttgttgtaatgttttttttttagtttttgattttattatttgagttttttttttttttttttatgttaatttagttaaagttttgttagtattatttatatttttagaaaattaatttttttttttattgattttttttattatttttttaattttaattttatttttaatttttattttttttttttttttgatggtttttggtttagtttgttttatttttttaagttttttatggtgtaaagttagattattgatttgagagttttttttgtaaatgtagttgtttaaatttgtaaattatttttattattatattttttgtatttaatgaaatgatatgttgtgtttttatataatttttttaaatatggatttaaatttgatttgtgattttttgtatatgttttattgtttgtgttgtttatttttatagggttatgaattttttagttttttttttgttgatttttatttttattttattatgataaaaaaatatattttgtatgattttaaacgtttaatatttattaatatttgtttggtattttaatttgtggtatatgttgggataatgttttatatgttcgtgtgaaaaatgtgtattttattgttgttggttttattgttttggatatatttgttagatataattggtttataagtggtttataatgttttttaatatttattttttttaaatttttttttgttagattgttttatttattattgaaagtggaatattaaagttttttattattattttagagttgtttatttttttttttaattttgtaaatgttttatatattaggagttttgatgttttgtgtatgtatgtttttaattgttatattttttaggtgaattggtttttttaatattatgtaatattttttgttttttataatattttttgattgttatttttattttatttgattttagtatagtaaattttgtttttttatttaatattttaatggaatatattttttatttttttattttttatttttgtttttatatttgtaaaatgagttttttgtatgtaatatatatttggattttttgtttttaaatttattgtgatatatatgtatatataattttaatatgttttttgattagtaagtttaaattatttatatttgaattaattattgataaggaagaatttagaatttattgttgttattttttatttgttttttgtatgttttaataggtttttgttttttagtgatttttttttgttgatttttttttgtagtgaaatatttttatgtttttttatttttttgtgtatattttatagatatttttgtggttattattaggttgtatatgatattttaaagttatagtaatttatttttaattaataataatttaattttaattatatgtaaaatgtttatttttttatagttttttaatatatattttatgttaatattataaattgtatttatataatatgtattaattaatattgatttataaattgttttgtttttatattttaaattttataaaataataaaaaatgattataaattaaaatagtaaaagttatgttttatgtttatgtatatatttattttttattaagaatttatatttttgtatgagtttgagttattatttagtatttttgtgttttagtttgaagaaatttttttagtattttttttaaggtagatatagtggtaatgaaattttttagtttatgtttatttgggaatgttttaattttttttatttatgaatagtaggttttttagatatagtatttttggtggatagatttttttttaaatatttgaaatgtattgttttattattttttggtttataaagtatttgttgaaaaatgtgtttataattttattgaagattttttggatataatgagttgttttttttttgcgttttttaaatgatttttttttcgtttttgagtgttggtaatttgataataatgtgttatagtgtaagtttttttgagtttattatagttgtagtttgtttggttttttatatttgtatatttagtttttttttaaatttggaaagtttttagtttttatttatttaataattttgttattttttttttttttttattatttttttagatttatataatgtatatattgttttatttgatgaattttataagttttgtttatttttttttatattttttaaaaaagtttgttttttagttttgataattatatatgatttgtttaaaagttaattgatttttttgtttattggtgtgggttgaggaatttttttagtggattttataatgtagttaatgtgttttttagttttagaatttatggaattttttttggtaatttttattttttgtttatttttattttttattaattatttttttgattttatttagttgtttttatttatttttttttaatttatttattatatttaagagtgttgttttagtttttgataagaaagtttgagggttgtgtttttttagagaaagtttgtggagatttatttttttttttaaaattgattatgtttatttgtttttttgtatattttttgttgaaaattggatatttgtaaaaatagtttttttttaattattgttaattggtattatatttaggggaggatttttattttttagttaagtatgaaatataaacgttttttgaggtttatatggacgtgtgttttgtttgggtttatgtgtgtgtattttttgtaatttttttatatatatattgtttttaatttgtaatttttttaagagttatatttgtttttttttatgattttagatgttttattgtatttttttatttataattttttgttttttggtatttagggagtagtagattttatgaagtttttataagttggagtatttattattattttttgtagttttaaatttgatatttaaattatgttattatttttattaatgttttaagttatgtgaagtagttattagttttttaaggaatttatagagaagttataatgttgtaaagtagttttatatttttttttttattttaaaggaagaatgaggaattaggaagtttttttttgattacgttatattatttaagggagaaagttaaatagggataaagaaaaatatttagaagttttttattattttgaatgtggtttaattttggtttggaattttttttgttgtaattaatttttaatagttgaaaatattagtttggtttaaaaattgttttttatttggtgtttttatggtataatgaaagtttggaacgtttttgtttgtaattttgttaatgttatttttagtgagaagagaataattttttaaattataatatttaaataatattttgattagatataaaattttagtttgaaaaatatttttgtttgaaaattgatttatagtattttatttgaaatttttgggataattttgatttttaatttatttttttagggggggattttagaaagattatttaatgtatatattgtatgtaggtattgtaagtgttttagtagaggtaatattaatattttaatattaaatgtattaagagttttttaataaattatgttattatttatattaaagtgagatgaataaggaagattaaaaatagttattgtattagtttttttttacgttgttatgaagaaatatttgagattgggtaatttataaagaaaagagatttgatttatttatagtttcgtacggttggggagttttaaggaaatttataattatgatggaaggtatttttttatagggtggtaggagagagaatgagtgttagtaggggaaatgtttgatgtttataaaattatagattttatgagaatttgtttattattataagatgatattttaagatgagatttgggttgggatatagttaaattatattagttatgtattattttatattatatttttaatttgtaagatgattttgttattatatttttttgttaatttttatttttttttaagtttttaaatcgtataaatttttttattttttagtatttttttaggttttaaaattgtagatatataattatggattagtattatgtaaaaattatttttttaatttgttgtagattgtttaattagattatttaatttttgtaggtgttttatttagtatttttggaagattttattattttgtttttaatattttttggttttattatatgtgtttatgtgtgaaatttttttttatttgataggtttaaatataggaatatttatgtttttttaaaagagaataatttatagttttaagaatttggatattttaattatataaaagttgtataaatatatggttattaatttaaaggaatatttataaatttaaatagaaaattggaatatacgttaggaattgaatgtttttaggtagtatataaggggttaaagaggtatatataagtgagagtgggattataatagttcgtagaagataaagttttaattaagtattaaaaattttaaggaagtatttagaggaagaaaattgggaatgtttttttagatagtaggaagggaattagtagtaagaagatttgaaaaagaaagatatattgtgtatttttagagtataaggtataagaaatttaaaagtaatagatatatataaaaagaaagatatagtttatgtaaggttttttaagttatgttgagtagaaatttatattaataaaaattaaaatttattgaaggattttaggaaaaatagagttatgtttttatttataaagaaatttatttggttgtttgatagaaattttttagtaaaagtaagattagttggaggtaaataattgattgtaaaaaataaatgtgtaaaaaataaatgttgtaattttatattagagagtagataggaggatggtaaaatgataattttatagatgtataggatatagagaataagttttaagttttagggagaaaaagtgttaacgagagttgattagggagagttaagaaggattagagtttattttataatttagaattgtagtgttgtggtagaaggttatttatataaggtgagtggttgtagtttatttatatttaggttattttggttatagtggataagggaagaattaggaattaagaggtaggtattgagggataggtttaggttttaataaaatattagaagaggaattagggattttgatattataaaatttatattataaatattgtaataattatttgtttttaaatattattttattatatatatttttgttttaatttattaatattaaaagggaagaattttattgaattttttaataaagtaagttttgatttattgtttatagtgatatatttggtaatttagttttttttttttatacgtatttaaggataatattttggtttgggatatttatttataaaagtatattttattttttaaaattgtttgtataaatgtgtaatgttgtgtgttatttttattttatagg

SEQ ID NO: 108 - DNA, 15732 bp, Artificial Sequence
  chemically treated genomic DNA (Homo sapiens)
tttataaagtaaaaatgatatataatattatatatttatgtagataattttaaaaaatgagatatgtttttgtgagtgagtgttttaggttaaaatgttgtttttggatgcgtataagaaaaagggattaagttattagatatgttattgtgaataatggattaagatttgttttattaggaggtttagtgaagttttttttttttaatgttgataagttgggatagaggtgtatgtggtgaaatgatgtttggaaataggtaattgttgtagtatttatagtatgggttttgtggtgttaaagtttttggttttttttttgatattttattggggtttgagtttattttttaatgtttattttttggtttttgattttttttttatttattatgattaaagtggtttaagtataaatgggttgtagttatttattttatgtgaataattttttgttatagtattatagttttgagttgtggaatggattttagttttttttggttttttttaattagttttcgttagtattttttttttttggggtttagaatttgttttttgtgttttatgtatttataaaattgttattttgttatttttttatttgttttttagtgtggaattgtagtatttattttttgtatatttgttttttatagttaattatttatttttaattagttttatttttattaaaaggtttttgttagataattaagtaggtttttttatggataaagatatgattttattttttttgaaattttttaatgagttttgatttttattagtatagatttttatttagtatgatttgaaaggttttgtataaattgtatttttttttttgtgtgtgtttgttatttttgaattttttatattttatgttttagaaatatataatatgttttttttttttaggtttttttattgttaattttttttttgttatttgggaaagtatttttagttttttttttttgaatatttttttagagtttttaatgtttaattgaggttttattttttgcgagttgttgtggttttatttttatttatgtgtgtttttttaattttttgtgtattatttaagggtatttagtttttaacgtatattttaattttttgtttaaatttataggtatttttttaggttggtgattatgtgtttgtgtaatttttatataattagagtgtttaaatttttagggttgtaaattgtttttttttgggagaatatgagtgtttttgtgtttaaatttattagataaagagaaattttatatatgggtatatatagtaaagttaaagaatattaaaagtaaaatgataaaattttttagaaatattgagtagaatatttataaagattaaataatttgattgaatagtttgtagtaggttaagaaagtaatttttatatagtattgatttataattatatgtttgtaattttaaaatttaagaagatattgaaggatgaaaagatttgtgcggtttgggggtttgggaagggatgagagttagtagggaagtgtggtagtaaaattattttgtaaattagagatataatgtgaagtaatatatggttgatatggtttggttatgttttaatttaaattttattttgaaatattattttgtgatagtgagtaagtttttatgagatttatggttttataaatattaggtattttttttgttagtatttatttttttttttgttattttgtgaagaggtgttttttattatgattgtaagtttttttaggattttttagtcgtgcggaattgtgagtaaattaaattttttttttttataaattatttagttttaggtatttttttatagtagcgtgagaaggaattaatatagtggttatttttaattttttttatttattttattttaatgtgaatagtggtatgatttgttgaagaatttttaatgtatttgatattaggatgttgatattatttttattgggatatttgtagtgtttatatataatgtatgtattaagtagtttttttaaaatttttttttaaaaaaatgaattaaaaattagagttgttttaggggttttaggtgaagtgttgtgaattagtttttaagtaaaaatattttttaaattaaaattttgtatttggttaaaatgttatttgaatgttatggtttaaaaaattgttttttttttattgagagtgatattagtaagattgtagataaggacgttttagatttttattatattatggaaatattaaataaagaataatttttgaattaaattaatgtttttagttgttaagaattggttgtaataaaggaaattttaaattaagattaagttatatttaaaatagtggaaaatttttaggtgtttttttttgtttttgtttaatttttttttttgaatggtgtgacgtgattaggaggaaattttttaattttttattttttttttggaatagaaggaaaagtgtggaattgttttgtaatattatagtttttttgtaggttttttgagggattagtaattgttttatatgatttggagtattgatggaaatggtggtatagtttaaatgttagatttgaggttgtaaaaagtagtggtgggtgttttagtttgtgagagttttatgggatttgttattttttgggtgttagaaggtaagagattatggatagaggaatatagtagaatatttaaggttatgaaaagaggtaggtgtggtttttagggaaattatagattaaaagtagtgtgtatatgagagaattataaaaaatgtatatatataagtttaggtaagatatacgtttatataggttttagagaacgtttatattttatatttagttgaagagtgaaagtttttttttgaatatggtgttagttaataatggttgagagggggttgtttttataaatgtttagtttttaataaaaggtatataaagaaataggtaaatatggttaattttaaagaaaaaaatgaatttttataaattttttttaaagaaatatagtttttagatttttttgttaaagattaaaatagtatttttaaatatgataaatgagttaaaggaaaataggtagagataattaaataaaattaggaaaatgattaataaaaaatgagaatagataaaaaatagaaattattagaaaaaattttataaattttgaagttgaaaaatatattgattgtattgtaaaatttattagaggggttttttagtttatattaataggtagaagaattagttagtttttagataggttatgtgtaattattaaggttgaagaataaatttttttaaaagatataaaggaaagtgaatagaatttataaagtttattaagtgggataatatatgtattatgtaagtttgaaaaggtgatggaaaagagaaaggaataataaaattattgagtaaataaggattgaaaattttttaaatttgagaaaagattaaatgtatagatataagaaattaaataagttgtaattatgataaatttaaagaaatttatattatgatatattattattaaattattaatatttaaagacgaaaagaaaattatttaaaaagcgtaagaaaaaggtaatttattatatttaagaaatttttaataggattatgagtatattttttagtaaatattttgtagattagaaggtagtgggataatatattttaagtgtttaaagaaaagtttgtttattaaaaatgttatatttgggaaatttgttatttataaatgagagaaattaagatatttttagataaatataagttgaaggattttattattattatatttattttaaaagaaatattaaagagatttttttaagttgaaatataaggatgttagatggtaatttaaatttatataaaaatgtaagtttttgatgaaaggtaagtatatatataaatatgaaatatgatttttgttattttgatttgtaattattttttattattttataggatttaaaatgtgaaagtaaaataatttataaattaatgttaattggtatatattatataaatgtaatttgtaatattaatataaaatatgtgttggggagttgtaaaggagtaaatattttgtatatgattgaagttaagttgttattagttaaaaatagattgttataattttagaatattatatgtaatttgatgatgattatagagatatttgtaggatgtatataaaggaatagaagaatataaaaatgttttattatagaaaaaaattaataaaaagaagttattaagagataaaaatttattaagatatatagaaaataaataaaaaatggtaataataagttttaagtttttttttattaataattagtttaaatgtaaatggtttaaatttattaattaaaaagtatattaaaattatatatatatatatattataatgaatttaaaaataggggatttaagtatatgttgtatataagaggtttattttatagatgtaaggataaagatagaaagtgaaggaataaaagatatattttattgaaatattaaataagagagtagagtttgttatattaggattagataaaataaaaataatagttaaaaagtgttataagagataaagaatattatatagtgttaaaaaggttagtttatttagaagatatgataattagaaatatatatgtataaaatattagggtttttaatatatgaaatatttatagaattgaagggagaaatagataattttaaggtaatagtaagagattttaatgttttatttttaataataggtagaataatttgatagaagaaaatttggaaaaaataaatattgaaaaatattatagattatttatagattaattatatttaatagatatatttaaaatagtaaagttaataatagtagaatatatattttttatacgaatatatggaatattgttttaatatatattataaattaggatgttaaataagtgttaataaatgttaaacgtttgaaattatatagagtatatttttttattataatggaataaaagtagaaattaatagaaagaaaattagaaaatttatgattttgtgaaaataaataatataaataatgaaatatgtataaagaattataagttaaatttaaatttatatttagagaaattatatagaaatataatatattattttattaaatgtaaagaatatggtgatgagggtaatttatagatttaaataattatatttataaagaagatttttaaattaataatttgattttatattataaggaatttaaaaaagtagaataaattaaattaaaagttattaaaaggaaggaaaaaataaaaattagaggtaaaattgagattagaaaaataataaagaaaattaataaaaaaaagagttggttttttgaaaatgtgaataatattgatagaattttaattgaattgatatagaagaaaaagaaggagatttaaataataaaattagaaattaaaaagagaatattataatagattttatagaaataaagagaatattttgaataattatatattaataagtgggataatttaaatgaaatggataaatggataaattattagaaatatataatttgtaaattttgaattataaagaaatagaaaattcgaatagttattatgattagttaggagattgaattagaagttaaaaattttttaataaagaaaagtttagattaagtggttttattggtaaattttattaaatatataaagaagaattaagattaaaattttttaaagttttttaaaatttgaaaaggagggaatatttttaaatttattgtatgatttagtattattttaatgtaaagttagatagaggtattagaaaaataaaattttttaaataatattttttatgtatgtcgatgtattttttttttataaaatgttagcgaatataattatatagtacgttaaatttatttatgtattatgattatttaaggtttatttttggaatgtaatgatggtttattatgtaataattaattaatatttttaatggtaaaagattgaaaatattttttttatttttgaaagatgaggaaaaatatatagatgtttattttttatttgtaaaaattaattaagataatatattatattattagaatgaaagataaaaaaaaaatgattattttaattgatgtaaaaaataaataaagtatttgataaaattaaatagttttttatgttagaaatatttagtaaacgaagaataggagaaaattattttaatatagtaaagtttatatacgaaaatattatagttaatattatttttaatggtaagagattgaaaatattttttttgtttttgaaatattaggaaaaagataaggatgatttttttgtttatttttgtttgagatagtattgagggtttaatatttatttttttttttattaaaaataggtaataaatagaaaatataaaatatttaaataagaaagaaaaaaggtaaattttttttttttattggtgatatgattttatatgtggaaagttttaaagattttatgtaaatatttagaattgataaataaatttagtaaagttataggaattaaaggtaatatatataagttagttgtgtttttatacgttaataacgaataaaaaggaaattaaggaaatagttttttttttgtatataatagtttaaagtagtaaaatatttaggaataaatttaattaaggtggtaaattatataatattttgaaggaattaaagaaggtataaatgtatatgggaaggtatttgtgtttaggggttagaagatttgatattgttaaggtgttaatatttaaggaattgtatatgtaatgtaatttgtaatgtaatttgtaatgtaaaattttagaagtgttttttatacgaatataaaaatttgttttaaaatttatgtagaatttaaaggtattttaaatagttttttttaattttgaaaataagaatatggaggttttagattttttgtttttaaaatttgttataaagatataataattaaaatagtgtggtattggtataaagatagatataaagaataatggaatatgatagatagtatagaaataaattttgagaaatatggtttattgatttttgatatggacgttaaggttgtttaattagaaagaatagtttttttaaaaatgttgttgggtaattgtgatatttgtatataaaaagttgaatttttatttatattatatataaaatgtaatttaaagtatattaaatatttaaatgtaggaattaaaattatgaaatttttagaataaaataaaagggaaaggttttatgatattggatttggtaatgggttttttggatatgatatcgatggtataggtaataataataataataaaatagataaattagattataataatatttaatttttatatatattaaagatataattaatagagtaaaaaagggaatttagagaatgagagaaaatatttatattttatatatttgatgagtgttttatatttagaatatatagttaatttttataaattaattttaataataatagaatttaaatagtgtgataaaaattgataaatacggtgaaattttttttttattaaaaatataaaaattagtcgggtatggtggcgcgtgtttgtagttttagttatatgggaggttgaggtaggagaatggcgtgaattcgggaggcggagtttgtagtgagtcgagatcgcgttattgtattttagtttgggcgatagggcgaaatttcgttttaaaaaaaaaaaaaaaaaaattgataaaggatttgaatagatatttttttaaaggtgttatataaatggttaataagtatatatgagtatgtttaacggtaataatttttagaaaaatataaattaaatttataaaaattataatgagatataataattaaaaatatatatgtataaaatatcggagtttttaggatgatgttttttggtattgttaaaaaaataattatagaaaataattagtgttggtgaggatgagtaaaaaagggaaattttgtatattattggtaggaatgtaaaatggtttagatgttatgaaaaaaatatgatttttatttttaaaattaaaaataatattattatatgatttagtaattttatttttagatatatttttaaaataagtgaaagtgtgattttaaataaatgtatgtatatatatgtttattgtagtattaattataatagaaaaatgtgaaagtattataagtgttttttaatggatgaatgaataaaaagaaatatggttttttacgtattttatggtaaatatatgaaatggaatattattttattttaggaagaaagaatattttgatatatgatataatataatatgaatgaattttgagaatatgaaatgaaaaaagttagttataaaaagtatacgtttattgtatgattaaatatatatgaagagttagagtttttaaatttatggggaaagaaggtagaatgatgtttgttaagttttggaggaaaggggaatggtgaaattgttggttaacggttagagttttagttttgtaagatgtaaaggcgttttggaggttggttgtataataatatgaatgtatttaatattattgaattgtatatttgaagttgattaagatgatatattttatgttatatgttttttaatataattaaaagaaaataattattatatttaaagtttttagaagtttggtagtgaaaatatttatatttatagttttttgtgaagaattatttattatgaaaagaaataaatttaagaaatgttggaggttaaaagggaagaaagattaagtaaatattttaattagtgtttttattattttaaaaataagtaaagttagagttaaataaaagaaaataggaattatatgaatatatttttaataggtgaagttgtatgtttgggggattagaagatgtgagagtttgttaaggggtttgtttttaaggagaatatagattttttaaaaataagaaatttgataagaaaggagaagaagaaagtatagaataagtgttataaattgaaataaagtaagatggtaaaattaagttaaaatatatatttttatagaatttgtatatttggattaaatttattaattaggaggaaaaatttttaatttggattaaaaataaatttagttatatgttgttgataaagtataaataaagtataagtttatttaagtttgagaaagagttggaaaagttatattttttaaattttaatttaaagaaagattttttaggaaaaatagtgtagtttaaaataggtttaagttaataagtattagtatatagttttattatataatggtaaagtatgtaatttggaaaaagatataataatttaaattatattataaatataatttgttattattttataaagtagtatatagaagtttttttttttttttaaatatatatataatatatatatttagatatatatattttatgtaaaaatatatggtagaaattaaaagaattataatgagaaattaataaaattattattagagttggagattttattatattttttagttattgaaagaataaggtaaaaaatagtttagatttagatttagattttttaaatataattaataagtttatttaagaaattttattttatttaaatagaatttggaatttaacgtttataaattttttttaagtatttatggagtaattagaaaatatttatatgtataaagttataaaaaagttaaaatgtattttaaagtaggaaatatataattgattttttttgtttttttattatattttgttataaaaaatgttatttatgattgagtaaagtatagattatttgaaaaagagaattatttttttttatatttgttgtaaaatgaagtataaaatgaaattgatttatgaaaatgtaaagattatttttgagtaaatgtttgtaaaattgagaaattaatgtgtgtatatgtttatgttttttaaaatagagataaaattatataatagagatttatattttggtttattttttattaaatattattttataataatttttttatttgattgttttgttttttaatttaggtttaaatttagttattaagttattttttagttaagaaaattaagtattttttttaaatattaatttatgttaaaagatatttaagaattaatttttaaaatttgttgtagataaaatatatttttttggtttatattttaattgtggtagaataaaagatatttatttgttatttagatagttaaagtatttagtttttagttttttgaatatgattgataataatatttttggttttaggtaattattttttattgagatggtgtggttattaattagatatttagatttttttttaaagaattttttagaaattttattttaatggatgttttttttataatagtttttagaaattttggagttattgttttgtttaggatagaattattgttcgtaaagttttggagagattaaattgtagattattttaattttgtaaagggttgagaaatgaaagttaataaggaaaaatggtatttgttagagttatttttaattttgattgtagatggtttttttatattgttttaatttttaattagaaagaagttatgtaattatgaaataattttgaagttacgtttattagtttttgtagttttttattttagatgttagagaaagtggttagtttttttttgtagtaagtaattttagttataaggagaaatgatagtaaatggtgtttttttttcgtttttttgatttataaatatttgttgaaaggagttttaaatttagaatttttttataaagttaatttatatataggttattagaaatcggtagtcgtttgaataaggattttaatataaattgggaaaggtaaaatattaaagtttttttttttttttttgtttatagagtggtaggagtaggagattttggtagagatgtttattgttattagaatttgattttattttttggataggggtgggtttattgtgaaattgtttttgtttaaatagtatttatatatttatttagttattaataattgatatatttggagtttgatagaggtagaaagttattatgaatatgtaaatttttatttaaataatttgaaagagttttatattagttgtttttttgagtataataattgagttgttttattttgattattaaatttatgattatttatgttttttgtattatttatggatagttggtttatattatgattgaaattttgaatattttggaatagtattgaaattttggaatgatagggggtttgataaattttttgtattgtaattttttttttttgtgaagaatagtgggtgtattataaagtattataattttgaattgttaaatgaatggtattagttagtagatagtgttgtggttattaattagttgatttgtaagtaaaatgtggttatgattggaaaaggattttaaaatagttaataggggaaaatgatttaaggttatttatagagaagaataaagttgattgttttaatttaaattagtagtatagagagagttaaagtttggatttggaaattgtttaaattttattaaagtagggtaaattagaaaaaattaagaggatttagaatgatagttattaatatatgtgggtgtttattgttttagttttttttttatgttgatgtttcgagtaggttttaaggtaaagggtaaagaggaatataaggaaattttattaggtgttttattttagtgtttgggaattaaaagagtttacgataggagttattatgttttaggatagttttttgttttgatatggtttggttttgtgtttttatttaaattttattttgtagtttttataatttttacgtgttgtggaagggatttggtggaagatgaatgaattatgggggtagattttttttatgttgtttttatgatagtaaatgggttttatgagatttgatcgttttaaaatagtttttaaaaaatgggagttgttttgagtaagttttttttttgtttgttgttatttacgtaagatgtgatttgtttttttttgttttttattatgattgtgaggtttttttagttatgtggaatattaagtttaataagatttttttttttgtaaaatgtttagttttgggtatgtttttattaatagtatgaaaatagattaataaagtaaattggtattaggagtagggtattgttgaaaagatattagaaaatgtggaagtaattttaaaattgggtaataggtagtaggtaatagtttggaaggtttagaagaagataagaaaatgtgggaacgtttggaattttttagagatttgttgaatggttttgataaaaatgttgatagtgatagaaataataagatttaggttgtggtggttttagatggagatgagggatttgttgggaattggagtaaaggtgatttttgttatgttttggtaaggagattggtagtattttgtttttgatttagagatgtgtgttttagagtttgagagagatgatttagggtatttgatggaagaaatttttaagtaggaaagtatttaagatgtgatttgagtgttgttaaaggtatttagttttaaaagggaaatagagtataaaaatttggaaaatttgtagtttaataatgtaatagaaaagaaaattttattttttgaggagaaatttatgttagttgtagaaatttgtataagtaaggaggagttaaatgttaattatgaagataatggggaaaatatttttagggcgtgttagggacgtgtgtagtagttagttttattataggtttggaggtgtaagaggaaaaagtggttttacgggttaggtttagggtttttgtgttgtgtgtagtttagtgatttagtgttttatattttagttattttagtagtggttgaagggggttattgtagagtttgtattatggttttagagagtgtaaattttaagttttggtagtttttatatgttgttgagtttgagagtgtagagaagttaagaattgaggtttgggaatttttgtttagattttagaagatgtatggaaattattggatgtttaggtagaagtttgttgtagaggcggagttttaatggagaatttttgttagggtagtgtagaagggaaacgtggggttggagattttatatagagtttttgttagggtattatataatggagttatgagaagagggttattattttttagattttataatggtatatatattgatagtttgtattatgtaattggaaaagttatagatatttaatgttagtttgtgaaggtagttaggagggaggttgttttttgtaaaattataggggtggagttgtttaagattatgggaatttattttttgtattaatatgatttggatgtgagagagagttaaaggagattattttgaagttttaagatttgattgttttattggattttggatttgtatggggtttgtagtttttttgttttggttaattttttttatttgagatggttgtatttttttagtgtttgtatttttattgtatataggaagtaattaatttgtttttgattttataggtttataggtggaagggatttgttttgttttggatgagattttgtattatggatttttgagttaatgattttgggggattgttgggaaggtatgatgggttttgaaatgtgaagatatgagatttgggaggggttaggggtagaatgatatggtttggttttgtgtttttatttaaattttattttgtagtttttataatttttatatgttgagggagggatttagtgggagaagaatgaattataggggtaggttttttttatgttgtttttataatagtaaatagattttataagatttgacggtttttaaaaaatgggagttgttttgtataagttttttttttgtttgttgttatttatgtaagatgtgatttgcgtttttttattttttgttgtgattgtgaggttattttagttatgtggaattgtaagtttaataaattttttgtttttggtaaaaggtttagttttaggtatgtttttattagtaggatgaagatggattaatatatgtttttttttagaaattaatttttgtagcgatattttttgttggttttttattagataacgtataaattgttgatttaaataatgattttattttataaatattttttaaatatttattttttatttttttggtttaagtttttattattttttgttaggattattattgttttaatttatttttttttttttagtttgaagttttaaaatttattttgtagtattttaagaagtatattgtaaaaaatagatgatagtatattttgtgattgtttgtttatattttgtttatataatgtttttttttattttaagtattagttattaaaatatttgtggaatgttggtgttttttagttttaggaaatggatgattatttatttaagttaattagggagattaagttttttttaagtagttgattaaaaatagatatgtgatttagttttagttattggtgtttaaatagaagtttgtagtaggaaaatatttaaaaaaaattttttttgttaggtaaaggatatgagttagaagaaatagtttgttatttgttttaattatttttgtgtttttatttggaatgagttgaggtaattgaattgagtgtagtggaagaaatgttttatggaagatattattgaattaatgaattaattagtattttttttttttttttaaataaaaaatttttttgtaaattttttattttttaaattatttaatttaagaatttatgttgtttgaggttgaaattattttaattagtttattgattatttaattttatttttttaaattttttagtattatatgtattgtttattggataaagtgattttttgtttggtatttaaggatttttataatttggtatatttttatttttttagttttattttttgttagtttttgttttttttttgtttgttttattatattaattgatagtttaatttttttatatttttaatatataatgttattttatatatattgttattttatgatttaatagatttaattatttttttttattttgaaattttttttatatattttttattttgttgtttatattttttttaaatgattatattaaagtttattttttttttggaaattatttatatttattataggttatttttgggtgtttttgtaatattttatacgtttttatgttttagtatttattgtattttattaaaattttttttttatttgtttgtgtattttttttgtattgaaatattagtgattagagttattattaattatttattttttttgtgttattaattttttgatataaattaagatgattaataaatgttggttgaattaaattaaatataatcgagtatgtagaaaatttatttaaattgaataattaaaatcgagtttttatttttatttttttttt

SEQ ID NO: 109 - DNA, 7906 bp, Artificial Sequence
  chemically treated genomic DNA (Homo sapiens)
agtaattataatttttaataagcgtattttaagagcggaagtatagggtgtattttataaattgtaaaggtcgatgcgtgtattttttgggatttttgagaaggtttttttttttttattttttaatttttttatttagttaggacgttttttttttcggatttttattgttatttttttttttattggtgtttttttttagatataggtttttgttttttgaattttagtttttttaaatataaaaagaagaaaattaaatttttttttttatggaggattatgaggatttaaatatatgaattaatatagagaatgaggttggtatcgagttttgtgggtttttaggagtgtttagttattattattattattattattattattattattattattattattattattaatagtttagaaaatagtgagtaaaagaagaaagaaaaattatttttgaaaatttttttttagtagtaattattattaataattggagaataatttttttggtttttaaataaaatgtatgaagtgaatttttaggaatttattatattgtgtaaattgtttggagatttatttttgttatataataatatatcgtgagtaatttgatatgttattatgttattttgtgtattattgttttagtggtttttaaattatttatagtattagtatattattgtttaatgtaatagtgattttatggattattgttaaagttggtttttaaattttttttttaagtaatttttattttttagggttttatttttggtttaggtttttttttttttagtttcgtttatagatttttattaaggtaaaatttagtattaaatatattatttattcgtttaaatattttttatggttttttagtgtttaatagttgaaattgtatttttattgtttggtagttaaagttttttataaattattgttttaattttgtttagtttttatattttttttgttatattttatatgttattttaaggatattttttatttttgttgtttttagtatttataaggaatttttttttttatttttgttttagttttatttattttttaaattttaatttaagtttatttttttttttttagttgatttattgtattatttaggattatatttaattggtaagaaataagatttagtattatagtgacgttaatataatacgagtttatttatttttgtatagaagatgattagaaatagaagatttaggggtaggtatggtagttttttagttattagggatcgagtttttttttggttttttttttttttatttttggggtgtatatttatttttgtggtttgatatggttgttagagttttagatattatatttatatttttgttagaaggtttttgaggaaaatgggagaagagtatattcgtttttttttagaaagttttttagaagtattatataagatttttatgtatattttattagttagaaagtgtttatttggttattttgttgtaagagaggttggggaacgtagtaacgtgtttattattaagaaagaagggagcgtggatacgggagatattttagttttttataatgagatagaaaagtttttttttttaagtataatgttgagtttttattttaggtagtagtagtgtgtgttggaagatataggttttggagttagatagatttggggtagattttggtttagttattgaattttagttagatgatttagaaaagttgtttagattttttgaatttttgtatttaaaaaatagaaaaggcggggtggggggagtagttgtgagaaggtaatcgattagaatttgtgtatagagaatataggagggtgtttagtataagtttgatggttatgaattgttatttttattagtattgtgttatttatatttatgtattttatattttataatattgtgttatttaaatttttttattataataatatttttattttattttattttaaagataagattttgttttgttatttaggttgaattgtagtggtgtgattatggtttagtgtagttttaaatttttgggtttaagtgatttttaagatttagttttttgagtagttgagggaagtttaggtatttggtatgtagttagggttgttagtaatatttgttgtattaaatggaattatattgttttgattttttttttgggtttggttttattttgttttcgttattgggatattgtgtataatgtggttttagtaggtttgggatggggtttggaaatttatattttttatttttttagtattgtaaattttttttttagaaggttttttaggagtattatataagatttttgtgtaggtcgggtatagtggtttatgtttataattttagtattttgggaggttaaggtagggggattatttggggttgggagttcgagattagtttggttaatatggtgaaattttgtttttattaaaaatataaaattagttaggtatgttggggtatgtttgtagttttagttatttgggaggttgaggtatgagaatcgtttgaattcgggaggtggaggttatagtgagttgagatcgtgttattgtattttagtttattaagaataaataaataaataaataaaaaaatttttgtttattattgtagttttaattttttgggtttaagtaatttttttattttagttttttaaatagttggaattataggtacgtattattatgtttagttaatttttttttttttttgtagagatagagttcgtcgttttggaatcgtttgaatttgggaggcggaggttggagtgaattgagatcgcgttattgtattttagtttgggcgataagagtaaaatttcgttttaaagaagaggaagaggaagaagaaggaggaggaggaggaggagatgaggaggagaggaggaagaggaggatgaggaggaggagaaaagaggaagaaaaagaggaagaagaagaagaagaggaagaagaggaagatgttgttgttcgttgttttggttgggttattagtaaggtatttgttttatagttttgtttagttttagcgagttgagttttaaaattgggttttaaggttttttatttttgtattttttcgggtaaattttcggaggtttcggtgtatcgcgcgtttagtcggtttaattcgagttagaagttttaattattgtttagtgtttgagttgtagttttgggttttttagaaatttggagatgtgcgtaaaatttagatgtcggtattttcgaatttttttaggttttagtatatttcggcggtttgtggatagatgggaggttattaatcgtttcggcgttcgtagttcgatttttgtcgttagatttcggacgtttttcggataataaagttttcgttttaatttattttttttaatttggacgtttttaatttatagtttttattgcgtttagttaaaagtcgagggaattcgttgttttttcgcgttcggataattatttttaaatggttacggtagttttttgtgttttttggagattagaatttcgtagttattaatggtagggtcgagtgagtcgttaattattttcgtttattttttgagagtcgttggtttgggtcgcgggaggagaggttataaagcgataggcgtagaaaatggttaagtttcgatttcgttttaggtagattttgtattttttttgattttaatttattttttttgtttttattattattattattattaatagtaaatattaaattacgtttttttcgaaattggtaaaagaagagtttttaagttttatattagagtttatttttaggaatttttttttttttttagtttttttttttaaatgtgttttttttttttaggattagcggtttagagatagggatatgttattgttttcgaggacgcgttgtttgaggttattttaaggttagatcggtgttttattgacgattttgttggttttattttagtaagttttatattaaaaggatttggtagttttttttttcgttcgggcgttataggtgttgtgatttttgggatagaagtttagagcgagggtgggggggggggaatatatatcgtgtatgaaaatcgattgtagattttagataattttacgtatttttatatttttggtattataggaagtagttttttttcgtaaggtttattttagttttaagttagagataaaggtttatttttatttcgaggtaaagtttataagattttagaataggaagaaaatgaaggtttggttttgtttcgttttttgaaaagaagttaatagtatgttttttttttaggataaatagttatgcgtattttaaaaattatatataaaaggaatgtgtaagaaataattttaatttaaattattgtggtagaagaagagggggggttagatagtggaggggggtatagggaaatttagttatagattaaagagaaaggtaaaagaagtagtagaggagagaaataaggacggggaaaaaaagaggagcggaaaagagggttgaggaggggaggggaggagggtagaagagaaggaacgagaataagggaaaattttttcgggaatatagaaagatagagatttaggggattttcgtagagagggttttttgggttttagcgtagaggaaagtttttcgggtattttttttttttttttgtttttcgtcgtttgggttttgttttgcgtgtttttaggtttagcgcgttttcgggcgagtttttaggagcgcggtttaatggatcgtttcgggttcgttttttcgcgcgttgattggtcgtcgtttcgttggtttcgttttattagtaagttttttggggagtcgcggtagggttcggagtcggcgagtgttttcgggaattttgtttgcgcggcggtagcgatcggaggttaggtttagtacgtcggagttggtttgttggggaggggcgggaggcgcgcgcgggagggttcgttcggttagggtttcgggcgttcgtagaggtcggtcgcgtttttagttcgttcggagtttatgttcggcggttggttagtgttgcggtagaagggggggttcggttttgtatggtttcggttgttgatatgatttttttgttattcggtgttaaagtggaggatttcgttttcggtaagtcggcggggggaggcgcgggttaggtttttagcgtcgtcgcggttacggtagtcgttatgggcgcggacgaggagggggttaagtttaaagtgtttttttcgtttttgttttttagcgtggaggcgtttatggtcgattataggaagtcgggggttaaggagagcgttttggcgtttttcgagggcgtgtaggcggcgggtggttcggcgtagttattgggcgtttcgtcggggtcgttgggagtttcggacgcgtttttttcgtcgcggtcgttcggttatttttcggtggggggattttttaagttgttagaagatgcgttcgttaaagtcgagagtttcgagaagttcgagaggatttcgtggatgtagagttttcgttttttttcgtcgtcggttagtgagtagttagaatttaggcgtagagggagggggtcgggtggggtgtgggattcgagggtttttggtggttttcggcgtttgcgtatttgtagtcggtgttagggagtcgtgggttgtaaggtcgggttttgcgtttttttttatttttatttaggaagaaggttttagattttttcgttttggtttagagacgttgcgggtgggagttaacggataggtcgtcgatgtttgggtattttgtttttttgtttttattaaacgattttaggggtttatgattttttatttgattttaaattttgttttatcggttttattttagcggatgaatgtgtgtggtgcggtattttttttgtattcggagttttattttttcgtagtaggagttggtgttttttagtttttttttttttttaagtatttttttgtttagaggtttcgaagtttttatagaattttatttttttatgttttttgagtttgaggtagatagttggtgttttgggcggatggatgatttaggggtggggatatttaggttttagtggagggggcggggtattaagttaattagggtaaggcgttttcgttaattttatgggaagtttttaaacgtttaggattgagttattaaagtggattttaggtgtttaaggcggttcgttttaaggttttacggttttttggttgttttatttagagaatacgttcggagatattttaggagtacgggaaatttttaagtttttttcgtttttttcgattattttgttcggtataatagtagttagattttaatggcgtgatgttgaggaatgatttttatttggggattaaacgtttttgaaaggttagtttttttttaagtttaatggtcggagaaggtggtttcgttttgggttgtcgtcgttgaagggagtgacgtttttttcggcgttcgtttttcgggcggttcggcggaaagttagttgggggttaagcgtttttcggattttcggtggtttttagtagggaagaagcggggtgttaatacgagatttcgtttgatttatattttggtggtttgaaagtttaaaggatcgttgtgttttttttgttttgttttgttttttttgtttgtttgtggttgttttttagagaggtgtgaaaaaatgtatatttaggtaaaattcgcgtggtgaaatatcgtcgatttgaatttattttttgtcgggaaagttgttgtataggtaaagtgttttttttaacgtttagggttttgggttttaagatttcgaagttaaagcgatttcggttgtgttgggataatttgttttatattttattcgggggtagtttttagtagattttattttcgatttgtattagttttgcgttttgatgtttttttattgtttatttttgaggtttattttgaagttaaaagaaaaagatagttgggtatgttgatgtttgttgattatgttataggttgaggggagaggcgattttaatatttttttcgtaataatattaatatatatatatatatataaacgtttgagtggggttagagggttttggcgttaggggtgaacgcgatttaatagaggattgagataatttaaagaaaaagtttattagaataaagtagtttttcgtttttcgttttagatgatattttttgtttttaagagggttggttatagtgtattttttatgatggtttgcgttgttttatttttggtttgcgggaattatttttagaatttcgtaggagcgaagtgtttcggggaaagtgtagaatttgatttggattttatgttataaaattgtttagttttatattgaagtatttcgtgggtattgataaatgtttggttaacgcgtaaaattaaatgtgtttttgggttgggcgtagggtttttttttgtatgttcgttaattgtattaatatttattttttttttggatggttttgggaggaggttcgttatgaaggtttttttaagtcgtcgggtagtataaaggtgattttatatttttttagttgtttaggtttaagatgtggatatcgagtttttaacgtgggtattttttttttggaattttagtttttttatttgtaaaaagtagataggaattttttttttgcggggttgtaatgggaattggagaaaatatattttaagtgttttgcgcgatgtacggtatcgaggtatttggcggtatttaatatttggtattgtttggttattattattattttttgggttgattatgtttcgatgttttttttttaattttttgtttttttttttttcggtttttagg

SEQ ID NO: 110 - DNA, 7906 bp, Artificial Sequence
  chemically treated genomic DNA (Homo sapiens)
tttgagggtcgaaagaaaaaaaagtaaggggttaagagagaagtatcggagtatgattagtttaagaagtagtaataatagttaaataatattagatattgagtgtcgttaagtgtttcggtgtcgtgtatcgcgtaaggtatttgaaatatattttttttaatttttattgtaatttcgtaggggagaagtttttgtttattttttgtaaatgaagaaattaagattttaggagaaaaatatttacgttgaaggttcgatgtttatattttaggtttaaatagttgggaagatgtgaaattatttttgtgttgttcggcggtttaggaaggtttttatggcgggtttttttttagggttatttagaggaaaggtggatgttaatatagttgacgaatatgtagaaagaggttttgcgtttagtttaagggtatatttagttttacgcgttggttaaatatttattagtgtttacggagtgttttagtgtggggttaggtagttttgtggtatagaatttaaattaaattttatatttttttcggaatatttcgtttttacgggattttaggagtagttttcgtagattagagatggagtagcgtagattattatggagggtgtattgtggttagtttttttagaaatagaaagtgttatttggagcggagaacgaggggttgttttattttaatgggttttttttttagattgttttagttttttgttggatcgcgtttatttttggcgttagggttttttggttttatttaaacgtttgtgtgtgtgtgtgtgtgttgatgttgttgcggggggagtgttgagatcgtttttttttttaatttgtggtatagttagtagatattaatatgtttagttgttttttttttttggttttaaaataaattttaagggtggatagtgaagaagtattagagcgtaggattagtgtaggtcggggatggggtttgttggggattgttttcggataaaatgtggaataaattattttaatatagtcgggatcgttttgatttcggggttttggggtttaaggttttaagcgttggaaaggatattttgtttatgtagtagttttttcggtagaaagtgaatttaaatcgacgatgttttattacgcgggttttgtttaagtatgtatttttttatatttttttaaaaaataattataaataaatagaaaaaataaaataaaataaagaaaatataacgattttttggatttttagattattaggatgtgagttaaacgaaatttcgtgttaatatttcgttttttttttgttggaggttatcgggagttcgggaagcgtttggtttttaattagtttttcgtcgggtcgttcgaggggcgggcgtcgagagaaacgttattttttttagcggcgataatttagagcggggttatttttttcggttattaggtttagggagggattggttttttaaagacgtttaatttttagataaaaattattttttagtattacgttattgaaatttggttgttattatgtcgagtaaaataatcggaggaaacgaggaaaatttgggaatttttcgtgtttttgaaatattttcgagcgtgttttttgagtagagtagttagggggtcgtgaggttttggagcgaatcgttttgggtatttggagtttattttaatggtttagttttagacgtttgggagttttttataggattagcgggggcgttttgttttaattgatttggtgtttcgttttttttattggaatttgaatgtttttatttttgaattatttattcgtttaaagtattaattatttgttttaaatttaaagggtatggggaggtagaattttgtaggagtttcggaatttttaggtaaagaggtatttgaaagggaagaggggttgggggatattagtttttattgcgagaaagtgaaatttcgggtgtagggaagatatcgtattatatatatttattcgttggggtgaagtcgatgaaatagagtttgggattagatgagggattatggatttttgaggtcgtttggtgggggtaggaggatagggtgtttagatatcggcgatttattcgttaatttttattcgtagcgtttttgggttaaggcgaggaggtttggaattttttttttgggtgggagtggagggaggcgtaagattcggttttgtagtttacggttttttagtatcggttgtaggtacgtaggcgtcggaggttattaggagttttcgggttttatattttattcggttttttttttttgcgtttgggttttggttatttattggtcggcggcggggagaagcgggggttttgtatttacggggttttttcgggtttttcggggttttcggttttgacgagcgtattttttggtagtttgaggagtttttttatcgagaaatggtcgagcggtcgcggcgaagagggcgcgttcggggtttttagcgatttcggcgggacgtttagtggttgcgtcgagttattcgtcgtttgtacgttttcggagggcgttagggcgttttttttggttttcggttttttgtggtcggttatgagcgtttttacgttgaagggtaggagcgaaggggatattttgggtttggtttttttttcgttcgcgtttatggcggttgtcgtggtcgcggcggcgttgggggtttggttcgcgttttttttcgtcggtttgtcgaaggcggagttttttattttgatatcgagtggtaaagaagttatgttagtagtcggggttatgtagagtcgggtttttttttttgtcgtagtattggttagtcgtcgggtatgggtttcgggcgggttgggagcgcggtcggtttttgcgagcgttcggggttttggtcgggcggattttttcgcgcgcgtttttcgtttttttttagtaggttagtttcggcgtgttgggtttggttttcggtcgttgtcgtcgcgtaggtagagttttcgggagtattcgtcggtttcgggttttatcgcggttttttagagaatttgttaataaggcgaggttagcggggcggcggttaattagcgcgcgagggggcgggttcggagcgatttattgggtcgcgtttttggggattcgttcggaggcgcgttgggtttgggggtacgtagggtagggtttaggcggcggagggtaggggaggagagggggtgttcgggaaatttttttttgcgttgaagtttaagaggttttttttgcgggagttttttgggtttttatttttttgtgttttcggggggatttttttttgttttcgtttttttttttttgtttttttttttttttttttttagttttttttttcgttttttttttttttttcgtttttgttttttttttttattgttttttttatttttttttttagtttgtggttgggtttttttgtgtttttttttattgtttgattttttttttttttttattataataatttgagttgaggttattttttatatattttttttatatatagtttttaaaatacgtatggttatttattttaggagaaagatatattattaatttttttttaagaaacgaaataaaattaaatttttattttttttttgttttgaaattttgtaaattttatttcgaggtaaaagtgggtttttgtttttaatttagagttggagtaaattttgcgggaagaagttattttttgtagtgttaaggatgtgagaatacgtaagattatttagaatttgtagtcggtttttatatacgatgtgtatttttttttttttattttcgttttgaatttttgttttaagggttataatatttatagcgttcgggcggggaaaggagttgttagatttttttgatatagaatttattgaaataaaattaatagaatcgttaatgaaatatcgatttggttttaaggtgattttaaataacgcgttttcggaaataatgatatgtttttatttttgggtcgttgattttggaggggagaggtatatttgggggagggggttgggaaaagaggaaagtttttggaggtggattttagtgtgggatttgagaattttttttttgttaatttcggagaaaacgtgatttaatgtttgttgttaataataataataataataaagatagaaaaaatgagttggggttaggggagatgtaagatttgtttgaagcggggtcggggtttggttattttttgcgtttgtcgttttatggttttttttttcgcggtttaggttagcggtttttagggagtgagcggaggtgattggcggtttattcggttttgttattgatgattgcggggttttaatttttaggaaatataaggggttgtcgtggttatttaggggtaattattcgagcgcggagggatagcgaattttttcgatttttaattgggcgtaataaaagttgtagattaggggcgtttagattagggaaaatgaattagagcgggaattttattattcggaagacgttcggggtttggcggtaggggtcgggttgcggacgtcggagcgattggtagttttttatttgtttataggtcgtcgagatatgttgaggtttggggaagttcgggaatatcggtatttgaattttacgtatatttttaggtttttaaaggatttaagattgtaatttaggtattgggtagtggttggggtttttagttcgagttgggtcggttggacgcgcggtgtatcggggttttcggaggtttgttcgagagggtataaggatagaagattttaagatttaattttgaagtttagttcgttgaggttgagtaaggttgtagggtaaatattttgttggtagtttagttaggatagcgaataatagtatttttttttttttttttttttttttttttttttttttttttttttttttttttttttttttttatttttttttttttttttttttttttattttttttttttttttttttttttttttttttttttttttttttgagacggagttttgtttttgtcgtttaggttggagtgtaatggcgcgattttagtttattttaattttcgttttttaggtttaagcgattttaggacggcgaattttgtttttataaaaaaaaaaaaaaattagttggatatggtggtgcgtgtttgtagttttagttatttgagaggttgaagtaggaggattgtttgagtttaggaggttgaggttatagtgatagatagaagtttttttgtttgtttgtttgtttgtttttggtaggttggaatgtaatggtacgattttagtttattgtagtttttatttttcgggtttaagcgatttttatgttttagttttttaagtagttgggattataggtatgttttaatatgtttggttaattttgtatttttagtaaagatagggttttattatgttggttaggttagtttcgaatttttaattttaagtgatttttttgttttggttttttaaagtgttgggattataggtatgagttattgtgttcggtttatatagaagttttgtgtagtatttttgggaagttttttgaaagagagatttataatattggagagatgaaaaatgtaggtttttaggttttattttaaatttgttgagattatattatgtatagtattttaatggcgaaggtagggtaagattaagtttaggagaagggttaggataatgtgattttatttaatgtagtaaatattattgatagttttgattatatgttaggtgtttggattttttttagttatttaggaggttaagttttgaggattatttgagtttagaagtttgaggttgtattgaattatgattatattattgtaatttagtttgggtgatagagtaagattttgtttttaaaataaaataaaataaaaatattattataatgaaagaatttaaataatatagtgttgtagaatatagaatatatggatatagatgatataatgttgatggggatgatagtttatgattattaggtttgtattgggtatttttttgtgttttttatatatagattttagtcgattatttttttataattgttttttttatttcgttttttttattttttagatgtagagatttagagagtttaagtaatttttttaaattatttagttggaatttagtaattgagttaggatttattttaggtttgtttgattttaaagtttgtgttttttagtatatattgttgttgtttggggtaagagtttaatattatgtttggaaaaaggagtttttttattttattgtggagggttgggatgtttttcgtgtttacgttttttttttttttagtaatgggtacgttattgcgttttttagttttttttgtagtaaggtgattaagtgaatattttttggttaatgagatgtatatagaagttttgtgtaatatttttgggaagttttttgaaagagagcgaatatattttttttttattttttttaaaaattttttagtaggaatgtggatatgatgtttggagttttagtaattatattagattataaggatgaatgtatattttaggaatggaagagaggaaagttagaaaaagattcggtttttgatggttgaagagttattatatttgtttttagattttttatttttgattattttttatgtaagggtgagtgaattcgtattgtgttaacgttattgtgatattgggttttgttttttgttagttgaatgtgattttaagtggtataatgggttaattgagaggaagagaatgaatttgggttgggatttgaaagatgggtaggattgagataggaatgggggaagaagttttttataggtgttgggaatagtaagagtgagaagtgtttttgaggtggtatgtggagtataataaggaagatgtaggagttaagtagggttagagtagtggtttgtaaagagttttggttgttaggtagtgaagatataattttaattgttaagtattggggagttatagaaggtgtttgagcggataagtgatgtgtttggtattggattttgttttgatggagatttgtaggcggaattgaagaggaggaagtttgggttagaaatggggttttggggggtgggaattgtttggaaaggaggtttggagattagttttggtaatggtttatggaattattattgtattaaatagtggtgtgttaatattgtgggtgatttggaagttattgaaataatgatgtataagatagtatgataatatgttaagttgtttacggtatattgttatatgataaaaataggtttttaaatagtttgtataatatgatgagtttttgaaaatttattttatgtattttatttaaaagttaagaaggttattttttaattgttaataatagttattgttagggggaagtttttagggatgatttttttttttttttttgtttattattttttaagttgttagtagtagtagtagtagtaataataataataataataataataataataatagttaagtatttttgagggtttataaagttcggtgttagttttattttttgtgttaatttatgtatttaaatttttatagttttttatgagggagggagtttaatttttttttttttatatttgaggaaattgagatttagaaagtaggagtttatgtttaggggagagtattagtggaaagagaggtgataatgaggattcgagagaggggacgttttagttggatggaggagttagggagtgaggagggaaaggtttttttagaaattttaggggatgtacgtatcggtttttatagtttataaagtatattttgtattttcgtttttaaaatgcgtttgttaggaattatgattgtt

SEQ ID NO: 111 - DNA, 17419 bp, Artificial Sequence
  chemically treated genomic DNA (Homo sapiens)
tataggggttggttattacgtttagttaatttttgtatttttagtagagatggggtttcgttatgttagttaggttggttttgaatttttgattttagttgatttattagtttcggttttttaaagtgttgggattataggcgtgaattattgtatttagtttatatatttttttttatatgtaaatattattttaagataaatttttaaattgggagaggtggtttacgtttgtaattttaacgttttggaaggttaaggtgggaggatggtttgaggttaggagttggagattagtttgggtaatatagtaagattatttttataggaaaattttttaattaattaggggtggtggtatgtgtttatagttttaattatttagaaggattattttagtttaggagtttagggttgtagtgagttgattgtgttattgtattttagtttgggtgatagagtaaaattttgtttaaaaaaaaaaaattttggaagtggaattataatgttaaagaaaatataaatttaaaattttcgggttaggtatggtggtttatatttgtattaattttagtattttgggaggttaaggaaggtagattacgaggttaagattgagattattttggttaatatggtgaaatttcgtttttattaaaaatataaaaattagttgggtgtggtggcgtttatttgtagttttagttatttgggaggttgaggtagaagaattgtttgaatttgggaggcggaggttttagtgagtcgagattatgttattgtattttagtttggtgatagagcgatttaaaaaaaaaaatattttttttttcgtagatattattatattaaattatttttgaaaaaggttgtaaaaacggggtttttgtaaaaagtaaatattttttttagtaattgtttttataagtatttaaataaaaatattttttttttttatttgttgtgaaaggttgatttttattttttatttgattaatttgtaatatttgatagaattaattatttttttttttatgaaatatattttttatttgttttgtttttttttttgtttgtttatttgtttgtttttgagatagagttttattttgttgttaggttggagtgtagtggtttatttcggtttattgtaaattttgttttttgagtttaagtagtttttttgttttagtttttttattatttgggattaaaagtgggagcgagtatatttggataatttttttatttttatagagacggaggtttcgttatgtttgttaggttggtttagaaattttgattttaagtgatttatttattttggttttttaaagtgttgggattataggtatgagatattatgttaggtttttttatttgtattttaaggtgggatgtttttggggttttttttagaatatattggatttttttttttttttaagagatagggttttgttttgttgtttaggttggagtgtagtgtgatgattatagtttattgaagtttttaatttttaggtttataggatttttttattttagttttttgagtaattgggattataggtatatgttattacgtttagttaattttttaaatttttatttatttatttattttgagatggagtttcgttttgttttttaggttggagtgtagtggcgtgatttcggtttattgtaatttttgttttttaggtttaagggatttttttgtttcggtttttcgagtagttgggattataggtgttagttattacgtttagttaatttttgtatttttagtagagacggggttttattgtgttggttaagttggttttaaatttttgattttagttgatttatttatttcggtttttaaaatgttcggattataggtaaattttttaatttttatttttgtagagatagggttttgttatgttgttaaggttgttttataaatttttggatttaagtgatttttttgtatttggttttttaaagtgttgggattagtaaaggtgtagttatagtttttagttggatttttttttttaatttttttttttggttttttttgtttttttgtattttgaatattgaaaggttttaggtgttagtttttggttttttttttatttataatatttttggttggattttatttaattttatggatttaaatattttttttttatttggatgtttaagagaaatttaaaaatgtttaaagtcgaatttataattttaattttaaaatttagttttatattttattttattttaatttagcgaatggtaattttatttttttagttgtttagagtaaatttttgtttttttttttttatattttaagtttttttttttattaaggtttttgttgaagttagatgtttaaagaaattttttattatatttttgagataaaatttttttattttttagtattattgtttatttttttagtttgtttatttttaaaatatagtatgttataatttttaaaattagtttatgtatttttttaatttgatcgttgttttttttattagaatatgagttgagagtagaaattttgttggtttattagggtatttttagtatttatagtagtgttgttggtatagtggttatttaataattatttgttttatgaatgaacgatttatgtaatttatatatagataattgttaaaaattaggttgttgagatggtaaaggtagtagatttagagaagaaatattaggtttggggtttatattagttatagttatgtagttttgggtattattttttaaagtttatttttttgtaaaacgggatttttgttattttttttaataaataagaaagttggaatagttaatatttatttgatagtataagataaaagatttattatttgtaatttattagaaatattttttttaattttttttttaattttatttgtttaggtataatataatatgagataatgtgttttagggttattattataatgatattatattattaagtttgtgtttttaatatattatttgtgtaaattttaagaatagtaattttaaggttacgtacggtggtttatgtttattattttagtattttgggaggttaagggagattaattttttgagatttagattagtttggttaatatagtgaaattttaattttattaaaaatagaaaaattagtcggcgtggtggtatgtatttgtggtttaagttattcggggggttgaggtgggaggattatttgaattcgggaggtagaggttataaagagcggagattatgttattgtattttattttgagcgatatagcgagatttcgttttaaaaataaaaaaatatatattagaaataattattagaaatagaaaattataagagattatttaatttcgtatatggggttattataaataattttagaatttagaaataagaaaaaaatattaaaagttttaaaattaataaaaaattagttttaggttaggtgcggtggtttacgtttgtaattttagtattttgggaggtcgaggcgggtggattacgaggttaggagtttaagattagtttagttaagatggtgaaatttcgtttttattaaaaatataaaaattagtcgggcgtggtggcgggttaattaggtggtgtttgtaattttagttattcgggaggttgaggtagagaattgtttgaattcgggaagcggaggttgtagtgagttaaaatcgtgttattgtattttagtttgggcgatagaatgagatttcgttttaaataaataaataaaaaaagttttagatgagttttgttagtagtaaacggtttgtaaaagaaattcggtatttggttaagttttaagtgatttgaattacgtatttttaggattttattgggatgattgtaatttgaacgcggtttttagagtagagtaagtatattttttggatttagtaatataaggggttagttttttttagtattttagttgttatcgttttgttaggttttttaggtaattgtttattttattttttttttagcgtggacgtttaaggggagggagtattttttttcgagggttaattggtatgtagtttacgaagatcgcgtgagttttttaattttagatttgttgcggggcggggacgtgggggtgataaaatttagattacgattttttatgagttttggtaatttcggggtgattttaatatcgatgaggttacgcgcgttttagttttgatattttttttagatcggcggggtttgaaatagcgggttaagttttatttacggttgagcgttagatttagttgaggagattttaaaagcgttatgttgggtttagatttaggttttttagagtagaacgcggaggggttcgattttagtttggtggcgtaggtgtgtgataaagtatgagggcgcgttaagttttttagttttatatttgttgtcgagtttagcgtttgttacgttttcgtgcggggattcgtttaaaattttttggaagttaggcgatttagatttcgttatcgcgtttttagagattgggcggaaatcggagattcgtttttcgaattcgcgaaattatttttcgcgagattgtttcgttttaatttcgtttcgtaattttattttttgattggttggaattacggtcggatttcggagttttttttagtttttttttcggtcgggtttttcgtcgaatataaaggcgtattgtgaattggtttttttttttcgttaattattttcgttagttatttattatcgattttttttatttttttttttttttttcgtttcgtagttttcgatttgttagttttcggttagttaagggattcgggttttttcgaattgcgtatgcgttatcgcgtttgtagggggagaagcgggtaggggcgtaggcgtagtagtgtgattttttggttagtttttaagtacgtgggttgggttgttttgtttggttgcggagggagtggaatttcgatattggtggtgtttatcgtgggtagcggattaataaaggttatggcgttagtagaaattttgaacgggaaggagattttcgcgtaagtatttgatattgttgttgagtgtggggttgtggacgagggttttgagggtgtgtaggtttttcggatttattttttgcgggagggatatttgtagcggaagagttaggtttataatatttgaagatttgtagttaaagaaagagaattcgggtataatttgcgtttgtaagtggattgtttagtggttgtagtcgttggtttttgtgtttcggggaaaagttttgtgtcgattatgtttttaaacgcgtagttgttggtgattttttgtcgggagagtgggtagttgcggttttttggagtttttttagttagaatttagaaatttaatttatttaattttcgttaatttggaggtgagtagatggagattagtgaggtgataaggtttgataagattataaggttgataatgatagagggtttttttagtttatagttttttttattatattatagttttattatacgttaagtgaaatttaatatattttttttttttttttaatttcgtgtttttttttaatagttatttttttgttttggttttagagttatttgaaacgtaatttggtttttgagttttgagaatattttgtattttatttgatttttgtttgttttatttttgcgggatatttgaatgtttaattagtgggtatcgttgttagttttatttttaggaagtaatattggttgttttttgtttgggaggtgattggtgaggaaaaatgagagtagaaggaagagggaaaaatatattttttttagtagatgaaggagggaaagatatattttgtgtgattttattgagtttgtttttgggattttttatattattcgttatgtaagttattgttgttagttatagtagttattaaattgtaattgttttgtaatttttaattttgtaataggtttttgagtgaattataaagttatcggtggtgaaaagttcgggtttagtggtttatgtttgtaattttagtattttgggaggtcgaggtgggtggattatttgaggtttggagtttaagattagtttatttaaaatggtgaaattttatttttattaaaaatataaaaaattagtcgagtgtggtggtaggtatttgtaattttagttatttgggaggttgaggtaggagaattatttgaatttggggggtagaggttgtagtgagttgagatgcgttattgtattttagtttgggtaataagagcgaaatttcgtttaagaaaaaaaaaaaaagaaattataatatttattgtttagtgttttttaatatgtggtttgttaaattgtatttttgttttattttttgtttttgtttgtttgtatttaaatttatttttttttttagtggttttttgttttaatataaaaattttttttttagaaagattgattgtgaagagataatttagtgtataataatagtgtagataatttagtataataataatgtatttgggttagtattgagaataggtgtttattgaatatattttcgttaattggagagtaaattaaatatgtttattaattttataagggtaaatatatgtattgttttatttttgtttatattttaaatatttggaaattttgttttttgttttattatttgtgtggttttaagtaaattaattaatttttttgtgttaaagtttttttaaatgttaagtaaaagtaatgtttaggttattgggatgttagtagaattaaatgggtttttaatagatgattatttataattttttttggtatataataagtattcgatatatgttgtattaataattagtaattagttaatgtatatatgaatgatttattatttttttttttttttatatggtagttgttgttttgagatttatttttttttttgagatgaagttttgttgtgtttaattttggtttattgtaatttttgttttttgtatataagtaatttttttatattagttttttgagtatttgggattataggtgttcgttattacgtttagttaatttttttttttgagatggagttttattcgtcgtttagattggagtataatggcgtgatttcggtttattgtaatttttgttttttgggtttaagcgatttttttgttttagttttttaagtagttgggattataggcgttcgttattatgtttagttagtttgtttgtttgtttgagatagagttttatttttgttgtttaggttggagtgtaatggtatgattttggtttattgtaatttttattttttaggtttaagcgatttttttgttttagtttttcgagtagttgagattataggtgtgtgttatttcgttcggttaatttttgtatttttagtagagacgggtttttattatgttggttaggttggtttgtaatttttgattttatgtgatttatttatttcggttttttaaagtgttgggattataggtatgagttattgtatcggttttagaattttttaaaaatttagtttattttttatattttattttgcggattaggaaattatttgaggttagaaaagtgatgtgatttgtttaagggtgaatggtaatggtttaattaaaattaaggtttttatttagtatatgatgttttttattttaattagtatttattatttgttaaaaggaatttcgtaagttttttttttttttttttttttttttttttttttattttttagataaggttttgttttgttgtttaggttggagtgtaatggtacgatgttgttttattgtaatttttattttttgggtttaaacgatttttttgttttagttttttaggtagttgggattacgggtatgtattattatgttcggttaatttttgaatttttagtagagatggggtttcgttatgttggttaagttggttttgaatttttgattttaagtgatttgtttatttttattttttaaagtgttaggattataggtgtgagttattgcgttttcgttggcgttttgttttttttttatagttttttttttattagtatgttttttattttgttgagaatgttatttttgattcgtttttttttattattattttttttttatgtttttttgggagttcggatattaataaagtttagtattttagattttttttttatttgttttattttgtgggaaattgggtatttatatgatggatttagttgttaaattatttttttttggaagtaatagtttttttttttttttacggggaattttaagtttgtagtttgaatttgataatcgggggaaggtttgagagttagagataagtatttgttttttgtgggtatttatttatttatttaataagtagttgtatgtgttttttaagttaggtaatttttaaagttttgagagtttaatagtgaataaaatagtttaaatttttatttttatgaaatttgtatattgatgggtagagatagatatttaaataggtgaaatatattgtgagttggtgggaagtataaagagaatattagagtagaaaagagggataggagtttttgtggtatggtggttgtaattttaaatatgggagttatagtttttgtaaaagtgatttacgggtaaagatttgaaggaggtggagttttaagtttgttaatgttgtgagggaaatagtttttgattaaaaatatagtttgtgttatagatttttgtttttattagttattaatttattgttttggggggttaatggtaatggttttgtgagaagttgatcgagtggaggtttttgagtagaggaatttgattttgttttgggtagaagggtggtgttttttaaaagattatgtaaagtgggagaaggatgtgtattagtgttggaagatttattttgttttgtaggtaagaaagtatagttgttttataagtgggttttttaaaggggggtttattatatttatatgatttgtttggttttttttttttttagtttgttataattaagtttgttttttttattggtggtattttttttgattaagttttttttttaaagagattggttgtgaagaggtagatggtttgagtaggtgttgcgagtgtttgttggttaagtgtagggtaagttgggtatatttgtaagttcgttgtggatggtagttttagagtttaagtacggtgttgttttttttgtgtattattgggttatgtaatttatttttgtgttttagtttttgtatattggggtagtaatgttatttaatttataaggttgttagaattaaatgagtttaatatttataaagtatttagagaagttgttggtatatggtaagttttaataaataggtatttagaaagtatttattgaataaaaaagtgatgtttgtgtttatttaggttgtatttttgggagttggtttataattttgagatttaaaattagaatttattttagtgattaaagataaaagtttggaattttggttgtatatttagttatagggttagaagaattgtttttgtgaaaataatttgtttattatagtgaagggtaggtttttttggttattaagttaatatggataagatttttattttgttttgtagattaaatatatgtaggtttttttgtgtttaaaaagatttgtttgggtagggcgtggtggtttatgtttgtaattttaggattttgggaggtttaggtaggaggattatttgagattaggagttggagattagtttgattaatatggtgaaattttatttttattaaaaatataaaattagttgggtatggtggtttatgtttgtaattttagttattttagaggttgagataggagaatggtttgaatttgggaggaggaggttgtagtgagttagtgagttaagatggcgttattgtattttagtttgggtaataagagtaaaattttattttagaaagaaaaaaaaaaaaaatttgtttgtaatgaattttaaagtgtaggttgtttaaaagttatatggaaatttgattgttatagttggattgattttggaagtttgtgtaggagaggtcggagttttagagaggttgggatttttagttaggattttagttaggttgttgggtaggttgtagcgatagtgtagtagagtttagagttggtagttaattattatggttatggtatttgattggggatgtggtttgtaaataagtgtttgtttttgtttattaggggagttgggattaggtagtttgggatttgggtagtggggttttgagtagaggtttgtggttttttgttatattttttatttgtatgaagaattttttagaaggaaagttggtttagtatagaggagggtttttggagtggaagtaaatggttttttttttttttaattgatttagtagaggttggtagaatagaggttaaggggtagggatgtttgtgtggttttggaaaagttagttttatttttttttttgtgtagtagggatgatgagaattgtttattttttgacgttgttttaaggattaaaagaatgtaagatttttaaaataagtttttttgacgttttatttatagtgtagaaggtttttattatttttgtattgtgcggttggtttttttttgtattttttaattgattaaaaagtagtttttgttattttgtaaatttttgattttgaagaagtgggtggttaaaggtgttatagttaagattttttagttattcggttattatttttatttttaattttgtagtttatgatattttagttagaagttaagtgatttgtttaggtgttttaaggtaggtggtagaggttcgatggtgtatttttttttttattatgggtttgttattggtttgttagaaggaattgtaaatttttattttttagtaggagatattttgggtttggttttttttgaggtttttttattgtgaggaaattattttatttattagtttggttgggaagtatttaaatagattttttttaaaaagttatttttgaagttatagtttaattttgattggttagagataggttagatttatttattttgttggttaagttttttttttttttttgttttttattataagtttggacgggagacgtattgtttggtatttggtgtttgagaggttttaggagataagggagtatttttgtgaaaggttttgttagagtttgttaggaatttaattttgattgtaatgaatgatttaatattataagtgatttttgggtttaggtgtttaaatattagtttttttttagtaagtagttttttagatttaattttttttatttaaggttttgtttagtttttttgaaaagtaggaaggttaggtttttgtgaggttttttttattataagtttttggtaggtttttttttttaagtggagaatttttattttttttattttttttatttttttttttgatgatttagagggttgtaagggatttagagttgtttattggagttttagttagttttagcggttagatttatggttaggtaattttttaatagtgagattaatttttagtgttagaattaggggtttgtttgtttttattagtagatttattggtattaatttttttttgttgatatatagttaagtatcgttttttatagatttttatatttagagttaattttgttttgttttataatttttgttattggtagaaggtgataaaattgtggtttagaggttaaatgttttttgtttggtttatagaattagattattttttaatatatttattattttataatattagattattttttaatatatttatgtttgtagttatatataaaaatttggatgtttgattttttgaaagatgtgaatagtttagtaatattgtattgtttatttttatgttattaatttgttggatttgagtagatgttgtttatttttttatttttgagtgggtgggggtgggggaggtgggattttattgtttaggaattttattatatttggttgtttgtattaggatttcgaaggtttttttttttttgagatttttttttgaatgaatttatggtttatttttaaaattttaaattttataaagttttaattagtttaatttagttcgtttattgtattagattagaggttgttaaatggggtagtttttttttttttttattttagggtattgggtatgtttggagttttttgggttgttatatggggaaggggtatgttattggtatttagtagtagaggttaggattggtgtcgagtattttgtagtgtataggatagtttttataataaaggatgatttggtttaaatgttagtggtgttgagatcgaaaaattttgattaagaagtttaatgtgagttattgtgttattgtgtgtgtggattaatgatggattttatttttattaagaattataggatttattaaaattttatattattttgatttatttttatgttataaatattaagtagtttatttttgtttttttagggttttgagttagagataattggatggaagaattttatattataaatttttaatgaagtataaaatagtttttttatattaagtttttaaatacgtatttgaggtaattgttaaatttggtaaatgtttgggttaaattataataatttttttagtaaatatttttatgtaataatagtattattgttagttgattgttttgtatattgatatagtttttgttatattagtgataggtgaaaattagtttttttttaataagaaggtaatttagtgttttaatttgatttaaatgattagtaatttgaaatatatgtattttttggaatattaggtggttttataattataattatttttataaggaattatatattaagtttttaaaaattttttgaaggtttttttttttttttttttgagatggagttttatttttgttgtttaggttggagtgtaatggcgcgatttcggtttatcgtaatttttgtttttcgggtttaagcgattttcgtgttttagtttttcgagtagttgggattataggtatgcgttatcgtttttagttaattttttttttttttttttgtatttttagtagagacggggttttatcgtttaggttgtgttaaattttttagtttaggtgatttatttattttagttttttaaagtgttgggattataggcgtgagttatcgtgtttagtcgaagtattttttagtagtataaaaattgttaatgaataaatgaaataaattaataaatgaataaaatgggaataaaatatattaaataaaatatttgtgttttgtattttaaaaattttataatagttgggcgtcgtggtttatttttgtaattttagtattttgggaggtcgaggagggtagattacgaggttaggagatcgagattattttggttaatacggtgaaatttcgtttttattaaaaaatataaaaaattagttgggcgtggtggcgggcgtttgtagttttagttatttgggaggttgaggtaggagaatggtttgaattcgggaggcggagtttgtagtgagtcgagatcgcgttattgtattttagtttgggagacggagggagattgcgttttaaaaaaaaaaaaaaaaaaaaaaaaaaaaaaaaaaatatatatatatatatatatatatatatatatatatatatatatatatatataaaaaatagtaatttattggggtaggggataaattgtgtttttgtttagaagaagatttttttttttttagaagaagttttgttgtttttgttgttgttatttgtttgtttgtttgttttgagacggagttttagtgggtcgtttaggttggagtgtagtggcgcgatttttgtttattgtaatttttgtttttcgggtttaagcgatttttttgttttagttttttgagtagttgagattataggcgcgtgttattacgtttggttgatttttcgtattttttagtggagacggggttttattatattggttaggttggtttcgaatttttgatttcgtgatttgtttgttttggttttttaaagtgttgggattgtaggcgtgagttattatgttcggttcgaagttttgtattttgaaggtgaatgtttttgttttttttttgattagttattaaaagtgttttttttgtgttatttgagaattatttgagaattattttaagtttatggtatattttagtatttttgttgtttaaaggtagttgtattttaattatgtaaattttatgttgttttttttgtttattatatagtttttgttgaaatgtttatgttatattttattttatttatttatttttttatatttataataagagttaaaggttatattttagtaatgtgtttttttttttgttataatatgttaaatattttaaatttagttatgatgttaaatagagtgaattggaatttttaacggatttcggtaggaatgattatataagatttagggttaaagagagtttgggtgattgtgtaggggtattaggttatgtttagtattatatttggttgttatttaggggagtagttagggttggaattgttggggagtgtaaattgtagtattttttgtttttttgttttagagtagaattgtggtttttatttaggtttaattttagttaaaaaaaaaaattttaatggtttattttttttttgagttatattattgtagagaatattgatttgaaaaaataaagttattaattagaaataaaatttgaattgggtgtagtggtttataattgtaattttagtatttttgggaggttaaggtgggaggattatttgagtttaggagtttaagattagtttgggtaatatggtaaaattttatttttataaaaaatataaaaattagttgaagtgtggtggtgtgtatttgtagttttagttatttgggaggttgaagtgggaggatggtttgagtttaggaggtggaggttgtagtgagttgtgattgtattattgtattttagtttgggtgatagagttagattttgttttaaaaaataaaataaataaataaaaattaaaataaataaaatttgaaaattttgggtatgattttttttttgtattatttaatatttttgatgtttattaggttagtttaaataatttattttttgtgtgtttgtttatgttagttttttgtgacgtgtggagaagtggaattgggagtaattaaattagaatgaaggaagagttgtttgtgaatgtttatatgataaatgataaaattggttttttaagagggatagagtatgtttaagttgaatattgtattatatattataattgggtaaggttgagttatttagatatgtatttatggatgtaattttatttatttgatattttagtgtattgttgagaagttgtatgttggtaaattgattattttagttttgtaagaggttatatttttttttattttaataaggagattgtaggaggttatatttttagttttgtgttaaattttttgtaaagaaaatttttttgtgaattagaatataatttgtaagtttatattgaatttggagtgggatttattgatttattatttaattttatgtggatacgttgtggttattttattagtgtaggttgagtaaaaggtgtgtgtttgagtttgtttttgtaaaattttttatgatagtatttggagagtggaaatgtgaaaaaagatgagtattagtattttttagaagtgttggtttaagtttttatttatttattatatgattttgaatgttattaattaatatatttttaattatttttgaattttgtggtttagttagtgttagtgggagtaagaaaagatttacgtgttcgggaatagtggtttacgtttgtaattttagtattttgggaggttgagatgggtggattacgaagttaggagttcgagattagtttgattaatatggtgaaattttatttttattaaaaatataaaaattagtcgggcgtggtggtacgtgtttgtaattttagttatttaggagattgaggtagtagaatcgtttgaatttaggaggtggaggttgtagtgagtagatatcgtattattgtattttagtttgggtaaaagcgagtttttattttaaaaaaaaaaaaaaaaaaaagaaaaaagaaaaagatttatatttatttgaggtttggaaaattgttgggaagtttttgtatatattaaattagataatgtttatttagtggtgtttttattttattttattttattttggagatagttttgttttatcgtttaggttggagtgtaatggtattattatagtttattgtagttttaattttttgggttttagttatttttttgtcgtagttttttgagtagttgggattataggggtttgttattatttttaattaattttttattttttgtagagatggggttttattatgttgtttaggatagttttaaatttttgttttaaagtaatttttttgttttaggtttttaaagtattgagattataggtatgaattattgtttgtttttggttagtgtttttgatttaaaagagaaatataggtcgggtgtagtggtttacgtttgtaattttagtattttgggaagttgaggtggggggattatttgaggtcgggagttcgagattagtttgattaatatagagaatttttacgtttattagaaatataaaattagttaggtttggtggcgtatgtttgtaattttagttattcgggaggttgaggtaggagaatcgattgaatttgggaggtggaggttgtggtaagttgagatcgtattattgtattttagtttgggtaatgagagtaaaatttggttttaaaaaaaaagagaaatataggtcgggtgtagtggtttacgtttgtaattttagtattttgggaggtcgaggttttagatcgtttgagtttaggaatttaagattagtttgggtaatggtgaaatttatttttattaaaagtataaaaattagttaggtgtggtggtatagatttgtaaagttttagttatttaggaggttggggcgaaaggatcgtttgagtttaggaggtcgaggttgtagtgagttttgattgtgttattgtatttttagtttgggtgatagagcgagattttgtgttaataaataaataaataaataaaagagaaatatatttaataatttgtattatttatttgtgtttgaaatatttagtgttaattttatttttttttttttttttagg

SEQ ID NO: 112 - DNA, 17419 bp, Artificial Sequence
  chemically treated genomic DNA (Homo sapiens)
tttagagaaaaaggaaagggtggggttaatattgaatgttttaagtataaataagtgatgtagattattagatgtattttttttttatttgtttgtttgtttattaatatagggtttcgttttgttatttaggttgggagtatagtggtataattaaagtttattgtagtttcgattttttgggtttaagcgattttttcgttttagttttttgagtagttgggattttataggtttgtgttattatatttggttaatttttgtatttttggtagagatgggttttattattgtttaagttggttttgaatttttgggtttaagcgatttaggatttcggttttttaaagtgttgggattataggcgtgagttattgtattcggtttgtatttttttttttttttgagattaagttttgtttttattgtttaggttggagtgtaatggtgcgattttagtttattataatttttattttttaggtttaatcgatttttttgttttagtttttcgagtagttaggattataggtatgcgttattaagtttggttaattttgtatttttagtaaacgtggagattttttatgttggttaggttggtttcgaattttcgattttaggtgatttttttattttagttttttaaagtgttgggattataggcgtgagttattgtattcggtttgtattttttttttaaattaaaaatattggttaggagtaggtaatggtttatgtttgtaattttagtattttgggaatttaaggtaagaggattgttttagaataggagtttaagattattttgggtaatatagtgagattttatttttataaagaataaaaaattagttgggagtggtggtaggtttttgtagttttagttatttaggaggttgcggtaggaggatggttggagtttaggaggttgaggttgtagtgagttatgatggtgttattgtattttagtttggacgatagagtaagattgtttttaaaataaaataaaataaaataaaaatattattgaatggatattatttggtttaatatgtataggaattttttaataattttttaggttttaagtagatgtgaatttttttttttttttttttttttttttttttttttgagatggggattcgtttttgtttaggttggagtgtaatggtgcgatatttgtttattgtaatttttattttttgggtttaagcgattttgttgttttagttttttgagtagttgagattataggtacgtgttattacgttcggttaatttttgtatttttagtagagatggggttttattatgttggttaggttggtttcgaatttttgatttcgtgatttatttattttaattttttaaagtgttgggattataggcgtgagttattgttttcggatacgtggatttttttttatttttattgatattaattgagttatagggtttagggataattgaaaatgtattagttgatggtatttaaaattatatagtaaataaatgaaaatttagattaatatttttagaaagtgttgatgtttatttttttttatatttttattttttaggtgttgttatgaaaaattttataggaataaatttaagtatatattttttgtttaatttgtattagtaagatgattatagcgtatttatataaggttgaatgataaattaatgaattttattttaaatttagtataaatttataaattatattttaatttataaaagaattttttttataaagaatttaatataaggttaaaagtataattttttgtagtttttttattagagtgaaagaaagtataattttttgtaaaattaagatgattaatttattaatatataattttttaataatatattaggatgttaagtaaatgaaattatatttataaatatatatttgaatagtttaattttgtttagttatgatatatgatataatgtttaatttgaatatgttttgttttttttggaaaattagttttgttatttgttatatggatatttataaatagttttttttttattttgatttggttatttttagttttatttttttatacgttataaaaaattgatataaataggtatataagaaatagattatttggattggtttagtaaatattaagaatgttgaatggtataagaaagaagttatatttaagatttttaaattttatttattttgatttttatttatttattttattttttgagatagggtttggttttattatttaggttggagtgtagtgatgtaattatagtttattgtaatttttattttttgggtttaagttatttttttattttagttttttaagtagttggaattataggtgtatattattatattttagttaatttttgtattttttgtagagatgggattttgttatgttgtttaggttgattttgaatttttgagtttaagtgatttttttattttggttttttaaaagtgttgggattatagttataagttattgtatttagtttaaattttatttttagttagtgattttgtttttttaagttagtattttttataataatatagtttaaaagaagaatagattattggaatttttttttttaattgggattggatttggatagaggttataattttgttttgagataagggaatagggaatattgtagtttgtattttttagtagttttagttttagttgtttttttgaatgataattagatgtggtgttgggtatagtttaatatttttatatagttatttaggttttttttggttttaagttttatataattatttttgtcgaaattcgttagaaattttaatttattttgtttaatattatggttgaatttaaaatatttaatatgttatgatagagaaaaaaatatattgttaaaatataatttttaatttttattatggatatagaaaaatgagtaaataaaataaaatataatatggatattttaatagaagttatatggtaggtaaaggaggtagtatgaaatttatatgattaaaatatagttgtttttagataataaaaatgttgaaatgtgttataagtttagagtagtttttaaataatttttaaatggtatagggaaaatatttttagtaattgattagagaagaagtaaaaatatttatttttaaaatatagggtttcgggtcgggtatgatggtttacgtttgtaattttagtattttgggaggttaaggtaggtagattacgaggttaggagttcgagattagtttggttaatatggtgaaatttcgtttttattaaaaaatacgaaaaattagttaggcgtggtggtacgcgtttgtagttttagttatttaggaggttgaggtaggagaatcgtttgaattcgggaggtagaggttgtagtgagtagagatcgcgttattgtattttagtttgggcgatttattgagatttcgttttaaaataaataaataaataaataataataataaaaataatagggttttttttaaaaaaaaaaaagtttttttttaaataaggatataatttattttttgttttaatagattattgttttttatatatatatatatatatatatatatatatatatatatatatatatatatatttttttttttttttttttttttttttttttttttgagacgtagttttttttcgttttttaggttggagtgtagtggcgcgatttcggtttattgtaagtttcgtttttcgggtttaagttatttttttgttttagttttttaagtagttgggattataggcgttcgttattacgtttagttaattttttgtattttttagtagagacggggttttatcgtgttagttaagatggtttcgattttttgatttcgtgatttgtttttttcggttttttaaagtgttgggattataggagtgagttacggcgtttagttattataagatttttaaaatgtagaatataaatgttttatttaatatgttttatttttattttgtttatttgttgatttattttatttgtttattaataatttttatattattaaaaaatatttcggttgggtacggtggtttacgtttataattttagtattttgggaggttgaggtgggtggattatttgagttggggggtttgatatagtttgagcggtgaaatttcgtttttattaaaaatataaaaaaaaaaaaaaaaaattaattgggagcggtggcgtatgtttgtaattttagttattcgggaggttgaggtacgggaatcgtttgaattcgggaggtagaggttgcggtgagtcgagatcgcgttattgtattttagtttaggtaataagagtgaaattttattttaaaaaaaaaaaaaaaaaaatttttaaaaaatttttaaaaatttaatatgtagttttttgtaaaaataattgtgattgtaaggttatttagtgttttaagaaatatatatattttaaattgttagttatttaagttaaattaaaatattaaattatttttttgttgaaagaaaattgatttttatttattattaatatagtaaaagttatattagtatataagatagttaattgataatagtattattattatataagaatatttattaaaaaaattattataatttaatttagatatttattaaatttgatagttattttaaatacgtatttgaaagtttaatgtgaggaagttattttatgttttattgaaagtttataatgtaaagtttttttatttaattgtttttaatttaaagttttaagaaagtaaaggtaaattgtttgatatttatgatatgaaaataagttagaatagtgtaaaattttaatgaattttataatttttagtgagggtaaagtttattattaatttatatatataatgatataataatttatattaagttttttgattagggtttttcgattttagtattattgatatttggattagattattttttgttatggggattattttgtgtattgtaggatgttcggtattagttttggtttttattgttagatgttaatagtatattttttttttatatgataatttaaaagattttaggtatgtttaatgttttgaggtagagggaggaaaaaattgttttatttgataatttttgatttaatgtaataaacggattaggttggattggttaaggttttataaaatttaggattttaaaagtggattataagtttatttagaaaaaggttttaaagaggaaagaattttcggagttttggtataggtaattaagtgtggtaggatttttgaataatgaggttttattttttttatttttatttatttaaggatgagggggtaggtagtatttatttagatttaataaattgatggtatgaagatagatagtatagtattgttaaattgtttatattttttaaaaagttaagtatttagatttttatgtgtaattataggtataagtgtgttaagaagtaatttaatgttgtaaagtaataaatgtgttgagaagtaatttaattttgtaagttaaataaaaaatatttggtttttaggttataattttattattttttgttagtagtaagagttatgagataagataaggttggttttgagtatgaggatttgtaagaagcggtgtttaattatatgttaataaaggagagttgatgttagtgggtttgttggtgagaataggtagatttttaattttaatattgagaattagttttattattggaggattatttaattatagatttggtcgttagagttgattagggttttaatgaatagttttaggttttttgtagttttttggattattagaggggaaggtagaaagaatggggaaggtaagggttttttatttggagggaagaatttgttaagagtttgtaatgagaaaagttttataaggatttggtttttttgttttttaaaaagattgaataaaattttaggtagaaaaggttaggtttaaaaggttgtttattaaggagggattggtatttgggtatttaaatttaaagattatttataatgttaagttatttattgtagttaagattaagtttttgataggttttggtaaaattttttatagaaatgtttttttattttttgggattttttaagtattagatattaagtagtacgtttttcgtttaggtttgtggtgaggggtaaagaaaaaaaaaaagtttagttagtaaagtaagtaggtttgatttgtttttaattagttaaaattggattataattttaaaaatgattttttgaagagaatttgtttgggtgttttttaattagattgatgggtggaatgatttttttataatggaaaggttttagggagaattaaatttagggtgttttttgttggagggtagaagtttgtaattttttttagtaagttaatgataagtttatggtagggaaagaaatgtattatcgagtttttgttatttattttggaatatttgggtaagttatttagtttttggttaaagtgttataaattgtaaaattgagggtaagggtagtagtcgagtggttgaggaattttgattgtggtatttttagttatttatttttttaaggttaaggatttatagggtgatagaagttgttttttggttaattaaggggtgtaaaggagagttaatcgtatagtgtaggggtaatgggggttttttgtattgtggatgggacgttaaagaagtttgttttgagagttttatatttttttaatttttggggtaacgttaggaagtagatagtttttattatttttattgtatagaaaggaaagtgaagttaatttttttaaggttatataagtatttttgttttttaatttttattttattaatttttattgagttaattagaggagaagggagttatttgtttttattttaaggatttttttttgtattaggttagttttttttttagaagattttttatgtaaataggggatgtaatagggaattatagatttttgtttaaaattttattatttaaattttaaattgtttgattttaatttttttgatggataaggatagatatttatttgtaaattatatttttaattaggtgttatgattatagtagttggttgttagttttgggttttgttgtattatcgttgtaatttgtttaatagtttggttggggttttagttgaaggttttagtttttttggaatttcgattttttttgtataggtttttagaattaatttagttatgatagttaagtttttatgtaatttttgagtaatttgtattttggagtttattataggtaaattttttttttttttttttttgagatgaagttttgtttttgttgtttaggttggagtgtaatggcgttattttggtttattggtttattgtaattttttttttttaggtttaagttatttttttgttttagtttttggagtagttgggattataggtatgggttattatgtttagttaattttgtatttttagtagagatggggttttattatgttagttaggttggtttttaatttttgattttaggtgatttttttgtttgggttttttaaagttttaggattataggtatgagttattacgttttgtttagataaatttttttaagtataaaagggtttatatgtatttaatttataggataaagtaaaagttttatttatgttaatttagtaattaagaagatttgttttttattatggtaagtaaattatttttataaaaatagtttttttagttttgtagttaaatgtatagttaaggttttaaatttttatttttgattattaggataaattttaattttaagttttaagattataagttagtttttaaaggtatagtttggataaatataaatattatttttttatttaatgagtattttttaagtatttatttattaaaatttattatgtattaataatttttttaaatgttttataggtattaaatttatttaattttaataattttatgagttaggtgatattattattttaatatatagaagttaaggtatagaggtaaattgtatgatttagtgatgtatagaggaggtagtatcgtgtttaggttttggagttattatttatagcgagtttataaatatatttaatttgttttgtatttggttagtaaatattcgtagtatttatttaaattatttgtttttttataattagtttttttagaaaggagatttaattaagaaaaatgttattaatggagagagtaggtttaattatagtaaattaagggaaggaaaaattaaataaattatataaatgtagtaagtttttttttgaaaggtttatttatagaataattatgtttttttgtttataaagtaaggtgggttttttaatattaatgtatattttttttttattttgtataattttttaaaagatattatttttttgtttagggtagggttaggtttttttatttaggagtttttattcggttagttttttatagggttattgttattgattttttaaagtagtaagttagtaattggtgaggataaaggtttatggtataggttgtgtttttggttaggagttattttttttataatattggtaggtttaaggttttattttttttaagtttttgttcgtaagttatttttataaagattatgatttttatatttaaaattgtagttattatattatagaaatttttgttttttttttttgttttggtgttttttttgtgttttttattagtttataatgtgttttatttatttaaatgtttgtttttatttattagtatgtaagttttatgagggtagggatttgggttgttttgtttattattagatttttagagttttgaagattgtttggtttaggggatatatatagttatttgttgagtaagtgaataaatatttataaagaatagatatttgtttttaatttttagattttttttcggttgttaaatttaggttgtaaatttagaatttttcgtgagggagaaaaggggttgttatttttaaagaaagataatttggtaattaaatttattatgtaagtatttagttttttatagagtagagtaggtagagaaggaatttggaatgttgaattttgttgatgttcgagtttttaggaaggtataaaaggagaataataatagaagaggacgagttagggatagtatttttagtagggtgggaaatatgttaatgagaggaagattgtaaagaaaaagtaaagcgttagcgggggcgtagtggtttatatttgtaattttagtattttaggaggtggaggtggatagattatttgaggttaggagtttaagattagtttgattaatatggcgaaattttatttttattaaaaatttaaaaattagtcgggtatagtagtgtatgttcgtagttttagttatttgggaggttgaggtaggagaatcgtttgaatttaggaagtggaggttatagtgagataatatcgtgttattgtattttagtttgagtaatagagtaagattttgtttgaaaaataaaaagaaagaaagaaagaaaagaaaaagaaaagtttacgaaattttttttagtaagtagtaagtgttggttagaatgaaaaatattatatattgggtgaagattttagttttagttgagttattgttatttatttttggataaattatattatttttttggttttaaatgattttttaattcgtaggatggaatgtgggaagtgggttggatttttaagaaattttaggatcggtgtagtggtttatgtttgtaattttagtattttgggaggtcgaggtgggtggattatatggggttaggagttatagattagtttgattaatatggtgaaagttcgtttttattaaaaatataaaaattagtcggacggggtggtatatatttgtagttttagttattcgggaggttgaggtaggagaatcgtttgaatttgggaggtggaggttgtagtgagttaagattatgttattgtattttagtttgggtaataagagtgaaattttgttttaaataaataaataaattagttggatatggtggcggacgtttgtaattttagttatttgggaggttgaggtaggagaatcgtttgaatttaggaggtagaggttgtagtgagtcgagattacgttattgtattttagtttgggcgacgagtgaaattttattttaaaaaaaaaaattagttaggcgtgatggcgggtatttgtaattttaggtatttaggaggttgatatgagagaattgtttgtatgtaggaggtagaggttgtagtgagttaagattggatatagtaagattttattttaaaaaaaaaaatagattttaaggtagtagttattatgtaaaaaaaaaaaaagataatgaattatttatatatatattaattaattattgattattaatataatatatatcgaatatttattatgtgttaggaagaattataaatgattatttgttaggaatttatttaattttattaatattttaatgatttagatattatttttatttaatatttgaggaaattttggtatagaaaggttaattaatttgtttaaaattatataagtagtaaggtaggaaatagggtttttaggtgtttaggatatagataaaaataagataatatatgtatttgtttttatggagttgataaatatatttaatttgttttttaattaacgaaagtatatttagtgagtatttatttttagtattggtttagatgtattattattgtattaaattatttgtattattattatgtattaaattatttttttataattagtttttttaaaaggaagatttttatattaaaataaaaagttattggaaaaggaagtaagtttgaatataagtaaataaaaatagaaagtaaagtagaaatatagtttagtaagttatatgttgaaaagtattaagtagtaagtattgtgattttttttttttttttttttagacggagtttcgtttttgttgtttaggttggagtgtaatggcgtattttagtttattgtaatttttgttttttaggtttaagtgatttttttgttttagttttttaagtagttgggattatagatgtttgttattatattcggttaattttttgtatttttagtagagatggggttttattattttggataggttggttttgaattttagattttaggtgatttatttatttcggttttttaaagtgttgggattataggtatgagttattgggttcggattttttattatcgatgattttgtaatttatttaaaaatttattataaagttaggagttataggataattataatttagtaattgttgtggttggtaatagtaatttatataacgggtgatgtgaaaggttttaagagtaaatttagtaaggttatatagaatatattttttttttttttatttattagagggaatatattttttttttttttttttatttttatttttttttattagttattttttagataaaaagtagttagtgttattttttgggagtaaagttggtaacgatatttattaattaagtatttagatgtttcgtaagggtagaataggtagaggttaagtggaatgtagaatatttttaggatttaggagttaaattacgttttaagtaattttaggattagggtagagagatggttgttagagagaagtacgagattgaagagaaaggaaaaatgtattagattttatttagcgtatgataagattatggtatagtgggaaaagttatgagttggaaggattttttgttattattagttttgtagttttgttaagttttgttattttattagtttttatttatttatttttaaattaacgggaattaagtagattggatttttgagttttgattaggggggttttaggaagtcgtaattatttattttttcggtagaaagttattagtagttgcgcgtttgggagtatagtcggtataggattttttttcgaagtataggagttagcggttatagttattaggtagtttatttgtaaacgtaggttgtgttcgggttttttttttttggttgtaggtttttaggtgttatgggtttaattttttcgttataagtgtttttttcgtaaaaaatgggttcgggggatttgtatatttttagagttttcgtttatagttttatatttaataataatgttaggtgtttacgcggagatttttttttcgtttaggatttttgttggcgttatggtttttattagttcgttgtttacgatggatattattaatatcgaggttttatttttttcgtagttaagtaggataatttaatttacgtgtttagggattggttaggggattatattattgcgtttgcgtttttgttcgtttttttttttgtagacgcggtggcgtatgcgtagttcggaaggattcgagttttttaattaatcgagagttaataggtcggggattgcgggacggaagagggaggggaagatgaagaaaatcggtgatgaatggttggcggaaatgattggcggaaagaaagagttagtttatagtgcgtttttgtattcggcgggaaattcggtcgaagagggagttggaaaggatttcggaattcggtcgtaattttagttaattagggagtagagttgcggggcggggttggggcggggtagtttcgcgggagatagtttcgcgggttcgggaggcgagttttcggttttcgtttagtttttggggacgcggtggcggggtttgaatcgtttggtttttagggagttttgggcgggttttcgtacgggagcgtggtaggcgttggattcgatagtagatgtggaattggagagtttggcgcgtttttatattttgttatatatttacgttattagattggggtcgggttttttcgcgttttgttttggagggtttgggtttgggtttagtatagcgtttttagaatttttttagttgaatttgacgtttagtcgtaggtgaagtttagttcgttgttttaggtttcgtcgatttggaaggagtgttagagttggagcgcgcgtggttttatcggtgttggggttatttcggggttgttagggtttatggagggtcgtagtttggattttgttatttttacgttttcgtttcgtagtaagtttggggttggagaatttacgcggttttcgtaagttatatgttagttgattttcgaggagggatgttttttttttttaagcgtttacgttggagaaggagtaagatggataattgtttggggagtttgatagggcggtggtagttgggatgttggagaggattggttttttgtgttattgagtttaaggaatatgtttgttttgttttaggaatcgcgtttaggttatagttattttagtagagttttgaagatgcgtggtttaggttatttaggatttgattagatatcgggttttttttataagtcgtttattattggtagagtttatttaaaattttttttgtttgtttgtttgagacggagttttattttgtcgtttaggttggagtgtagtggtacgattttggtttattgtaattttcgtttttcgggtttaagtagttttttgttttagtttttcgagtagttgggattataggtattatttaattagttcgttattacgttcggttaatttttgtatttttagtagagacggggttttattattttggttaggttggttttgaatttttgatttcgtgatttattcgtttcggttttttagagtgttgggattataggcgtgagttatcgtatttggtttaaaattgattttttattaattttggggtttttaatattttttttttatttttaaattttgaggttatttatagtagttttatatacgggattagataattttttgtgattttttatttttggtaattatttttaatatatgtttttttgtttttgagacggagtttcgttatgtcgtttagggtggagtgtagtggtatgattttcgttttttgtagtttttgtttttcgggtttaaatgatttttttattttagtttttcgagtagtttggattataggtgtatgttattacgtcggttaatttttttatttttggtagagttggggttttattatgttgattagattggtttagattttaagggattagttttttttggttttttaaaatgttgggataatgggtatgagttatcgtgcgtggttttaaagttattatttttaaagtttgtataagtgatatgttaaaggtatagatttagtaatataatgttattataataataattttaaaatatattgttttatattgtgttgtatttaaataagtgaaattaagaagaaaattgaaggaaatgtttttggtaaattgtagatagtgaattttttgttttatattattaaataggtattgattattttagtttttttatttgttgaggaagatggtagaaatttcgttttatagagggatagattttgaaggataatatttaaagttgtatagttgtggttggtataggttttaaatttgatgttttttttttaaatttattgtttttgttattttaatagtttggtttttgatagttatttatgtatgagttgtataaatcgtttatttatggagtaaataattattgagtggttattatgttaatagtattgttatagatgttagagatattttagtgaattagtaaagtttttgtttttagtttatattttggtggaggagataacgattaagttaaagaaatatataggttaattttagagattatgatatgttatattttaaaaataggtaagttaagaggataggtagtgatgttgggaggtgggaaagttttgttttagaaatgtggtaagagatttttttgggtatttgattttagtagaaattttaatgaagagaggaatttggaatgtaaaagaaagaaagtagggatttgttttgagtaattggaaagatggaattgttattcgttgagttgaaataaagtaaaatgtaggattaggttttggggttaagattatgaattcggttttagatatttttagattttttttagatatttaaatggagagaagatatttaaatttatgggattgaatgagatttaattaagggtattgtaggtagagagaggattaaagattgatatttagaattttttagtgtttagaatgtaaggagataggaggaattaagagggaagattgaaaaggagagtttagttgggagttgtggttatatttttattaattttagtattttgggagattaaatataggaagattatttgaatttaggagtttgtagaatagttttagtaatatagtaagattttgtttttataaaaataaaaattaaaaaatttgtttgtaattcgagtattttggaggtcgaggtgggtggattagttgaggttaggagtttgagattaatttggttaatatagtgaaatttcgtttttattaaaaatataaaaattagttgggcgtgatggttggtatttgtaattttagttattcgggaggtcgaggtaggagaattttttgaatttaggaggtagaggttgtagtgagtcgagattacgttattgtattttagtttgggagatagagcgagattttattttaaaataaataaataaataaaaatttaaaaagttagttgggcgtggtggtatgtatttgtagttttagttatttagaaggttgaggtgggaggattttgtgagtttaggagttggaaattttagtaagttataattattatattgtattttaatttaggtaatagagtaagattttgttttttaaaaggaaaggagagtttagtgtgttttaaggaaaattttaagagtattttattttagaatataagtgaggaggtttggtatggtgttttatgtttgtaattttagtattttgggaggttaaggtgggtggattatttgaggttaggatttttagattagtttgataaatatggcgaaattttcgtttttataaaaataaaaaaattatttaggtgtgttcgtttttatttttaattttagataatagggaggttgaggtaggagaattgtttgaatttagggggtagagtttgtagtgagtcgagataggttattgtattttagtttggtaatagagtgagattttgttttaaaaataaataagtaaataaataaaaaaaaaaataagataagtgaagaatgtgttttatggaaaaagaggtaattaattttgttaagtgttgtaaattggttaaataaagaatgaaaattaattttttatagtaaatagaaggaaaaaatatttttatttaaatgtttataaaggtagttgttagaaaaaatgtttattttttgtagaggtttcgtttttataattttttttaggggtaatttgatatgataatatttacgggaaaaaaaatgtttttttttttgagtcgttttgttattaggttggagtgtagtggtatgatttcggtttattgaaattttcgttttttaggtttaagtaatttttttgttttagttttttaagtagttgggattataggtgggcgttattatatttagttaatttttgtatttttagtagagacggggttttattatgttggttaggatggttttaattttgatttcgtgatttgttttttttggttttttaaagtgttgggattggtataggtgtgaattattatatttggttcgaaaattttaaatttgtattttttttgatattgtaattttatttttaggattttttttttttggataggattttattttgttatttaggttggagtgtagtaatataattagtttattgtaattttgaatttttgggttaaagtgatttttttgagtagttgggattataggtatatgttattatttttgattaattaaaaaatttttttgtagagatagttttgttatgttgtttagattggtttttagtttttggttttaaattatttttttattttgattttttaaaacgttgggattataggcgtgagttattttttttagtttaggaatttattttaaagtaatatttatatataaagaaagatgtataggttgggtgtagtggtttacgtttgtaattttagtattttggaaggtcgaggttggtggattaattgaggttaggagtttaagattaatttggttaatatggcgaaattttatttttattaaaaatataaaaattagttgggcgtggtggttagtttttgta

SEQ ID NO: 113 - DNA, 11836 bp, Artificial Sequence
  chemically treated genomic DNA (Homo sapiens)
  unsure (4234)
ttgtttttataaaaattatttatgtttattgtaaaataattaaatagaaaatttttttaattagttattaattgatgaatatttagattgtttttaatatttgtaattaaaagttatgttgaatgagtattttatgtatttatttttttatatttttaattatttatttagaatatttaaaataaaaattgaggggttaaagaatatgaaattttaatttgtaatagtgatttttaggaaaaatgtattaatttatattttaattagaaaagtatgtgggtgttattttatttatagttttattgagttttattagtattttttattattaatatttttaatgttggtttaaataaaaggtaaaagaaatgttattttatttttttttttaatatttttgattagtagtaatgttgaatatttttttttgtttaatttatttgtttatttttggtttgtttgtttaaatttgttgtttatttttttattatagtatttatttttttattgatacgtgtttttagtgattttttgttgattataattattaatttttttttttatttgttatttggtttttaattttgtttatggttttttttgatttggggggtggggaatgaaatttaatttatttgtttaggatttattttttttaagtattttattatggttattttaggattatattttgtttatgattattttttgtttgggatggaattaatattattggttaatgtttttgattagattttattttgagttggagagtaattttgataatcgatttttaaatgtatttgcgttaattatatatatatgattatgaaatatttataagaattttatttttttttttgtaaacgagtattttttttttgtattgttatttaattttgttttaagattgttgttgggattaataagatttatattttttaaatttaggttagaaaattttaaaatgtagttttttaggttatttttttggtttggtgaagtggaagaaggtatttggtttggttgtaatagtgaagtagatattttttttagttaaatattttttagaatataaataagaaagaagtagttatgttattttttgattttttgaagaaaatatgaagttaattaattacgtaaattagtatgggtaaagtagtttaagttaattatttatttatttattaaattaatagtatttatttaggaacgattcgaagttaagtattattttaagtattgagaatatagtagtaaacgaaagtgaaaaagtttttgtttgtttagagtttatattttagtggggtgaagtaaataagtggataaattgattttttatttttaaagttagatggtgtaaaggttatgaagaataattagtagggtagggaggtagtgatggagaagttttttcgatatagagagtaggaaaagtttttttgtagtaatagtatttgagtagaaattttgaattagggagcgagttatgtagttattagggtaaataatatttagaaaagtaataggtataatttaaattaattaagatgtgtgttagtatttttagttataaatatttttttttttttgttttttaattttagagttatgaaaatttttttttttagaagaaatagtttttaagatagttttattgtaatatgttagaagaaatgttaaaatcgttattgtggttaaattttgttaaaatggatatattataattattatattatgttggtttttttgtaaagtaaaggtgataggtgataagtattaagaggtatattgagaaaaagtatgggttttggtttgtgttgtagtagtttgttaagtatgtgaatatgggtaagttatttaaggtttttgagttttaaattttttttgtggaaattgtgtattgtagtatttatattatagtattgtattgtagattggaaagaaatattaatatatagtgtttggtataaattagggtttaatgaatggtaatattattaatattttaattgaatgttgtattttaaatttaatattaaaattttatttaaaaattagttgtgatagattatattttttaaaaatggttgtagtagtatttttggtttatttttttaagtttaggtaggtttgttaattatttttaaaaataaagcgtgatggaagtaatgttgtatgattgaggttgggtttttaaaaggatacgttagtgtaagtttttattttgagatgtttacgttgaggagattaaattattgtattgtgagtaagttaatttaatttatgtagagattatatatagagaattaggtggagaggaatagaggtttttagttgatagttagtattaattattagattttttagattttagattggtttttgagttgagagtagagataaggtgtttttgttgtgttttgtttaaatttttgttttataatataataattggttattttatattattagtgaattggttaaagttagttttttttaggataatattgaaggaggtagttagaggtggatattgaaggttttgaaatagttatatggtaagtagttttaaaattattttttttttttgggagtatgagaagtaattatttataaaataagttagattggttttgtataggggtttatgtttgtaattttggtattttgggaggttaggagtttaagattagtttggttaatatggcgaaattttatttttattaaaaatatataaattagtttggtgtggtggcgtatgtttgtaattgtcgttatttgggtggttaaggtataagaattgtttgaatttaaaaggtagaggttataacgagttaagatcgtgttattgtattttagtttgggtaatagagcgagattttgttttaaaaaaaaaaaattatattttaatgattttttaatttatttggataatgtttaaagtttttatagagtattttttttttatttttttgattttatttattattttttcgttgtttattatttatgatggtattatttgtgggtatttttgaatgggtcgttagaatatattagcgttaagagagtaggggtttttttttgtttatttttatatttttagtatttagaattttgtttggtatttaggaggtgttaaatgttaataaatataatattcgttgaatgaaataaaatagtgattgggtaattaaagaaggttttattaaggatttgatatttgagttgagatttaagtgattaagagttagttacgtagatttagaattagagatttttaggtaaaggaaatagtataagtttttaaaataagaataagtttgatttattgtaagaatagaaagagtggttggagtatagtgaggagaagtagaattttataggttatggtatggagtgtgtaatggaaagtcgtaggagattttttttttttgatacggttttattttgttgtttaggttggagtgtagtgtgcgattatcgtttattgtattttcgattttttgggtttaagggatttttttatttcggtttttaatttttttttcgagtaattgggattataggcgttaaatattaggtttagttaattttttttttttttttgtaaagacggtgttcgttttgttgtttaggtgggttttgaatttttaggtttaagcggattcgttcgcgtcggttttttataagtgttaggattataagcgttagttatttcgttcggtcgttataggagatttttaaataaagtagtaatacgatttgattttggatttgtgttgaaagtagagtaggtagggtttatagataattgttatgtaaaaagagggaaaagagttaagaaagattttaaatttttggattaagcggtcgacggatgacgttatttattgaaatgggtaagatcgaaggagaattaggtcgggagagtgaaattttagatggttatggataaagtagataagttagtatggtgtttataaagatattaggggaggggacgtttatatataggtatataggtatttaataatttttgaaaatagattattaaaataattatttgtttttttttaagtaaataatttaaggaaaatgacggttagtcggtaagttcggagtcgtacgttcgcgttagggttcggttttttatattaaggggcggaacgtgcggtatcgtttttcgtttaggttttatttcgtatgtcgagtttggtttaatttntttttttattttttttagggcggtaaaagtcggaaagtgggagtagatgagtatatattcgttagttttgattttttttaaggttttttttttttgtattgttttcgtttagtaattgttattgtttatcgttttcgagtttattttttcgtcgcgtatttgggtagaaaagttcgttcgtgacgttattaagtttcggaagttttttggcgtcggcgtaagggtcgtcgggaaaattattgagaggttatcgggaaattattgagaagtttcggaggatcggtttgagcggaggcggagattagagcggtcgtcggtacgattcgtttttaggcgtacgacgatcgcggttcgggggttttgagtggttaaagcggcggtattttttgcgtggtttcggaaggatatagagcggaaggcgggagaaagaagtagtcggtaggcggaggtagttcgagggggcggttgtatgtgtgttagacgttcgtagtttattgagtttttttacgtcggttgtcgtagcgtttagttttattcggcggttttttttgcgttttcggggtcgtggcgagttagtgcgtttgcgtgtcggtttattcgcgcgttttgtagttgtttttgcgtcggttagcggttagatagtttttgtagcgtttatcgtttggtttttcggtttcgcggcgtatcggagggtagtatgtcgcggcggcggtatagcgacgagaacgacggtgagtgtttgcggttcggttacggaggtcgttttcggttgggagtcgaggttcggcgtttttgggtgtttacggaagagattggaagttttttttttcgggaacgtgcggggagtcgcggagggaaagaggagaatatggtggcggtgtggtcgggcggtttttagaaagcgatttttttttcgttttagttttttgagttaagggtcgattttcgggaaagaaggtttggtgaattttatgggtagatttttggtttttaaggatgttttagaatttcgttcgtaaaattacggagtagggaagtatatttgtgtttgtgttgtcgttttttagggatttattggttttagtgtttcgttttaatttttaaagttgtatttgaaaagggttcggaagaatttattgaaggaaaggattgagagattttatgagttgtagtttgaattttgtttcggtagtggttattcgttgattttattttttttaagttgtagggaaagaatattgttttatttgcgtttaagaggtttttaataaatagatataggttattgtagattttgaattggtcgtaagcgtattttttttgtgtgagagagagtgttagaaaattaattttaggtttttgagagagttagaataggggtttttattttcgtttggatgattgtgttcgtggagattagtgttgtttttataaagatggaataattttagttttaataataataaaaaaaagatgtttatattatatataagttttataatcggttaaaaatataaatttatatattaaaaaagtaaaatttagagtaattttattgttaatattttagtgtattgttttttgaagagagtgtatagtagtggttaagagatgagattttggaattagagggtttaggtttaaagttagattttattatttatttggtgattttgtttaggttatgaaatttttttaaattttagtttgtaatatagaagtaatgatatttatattttttggtttttgtgaaggttaaatgaggtaatatatattagtaataatgatgttttattatttgttaacgtttaagaggcggtaaacgttagtagatgttgttaatgtaagaaaaaaatttataatagatattttaaattgagtaaattttatttattaacgtttgtttttttttgagtgttgtggtagttgaggtggaggtagaatcgtatgtatttagttttaatagtgaaatattagatttttacgaaggaatggtttgagaggatattttagtttagttttttatttgatatttaagggtttagagattgagtataattaagatggagggatagttgttagtttttaaatattagtaagagcgaatttagttcggggttttttttattatataggtataaattaaataattatgttgcgtgttttgatttttaatacgaggttttttgtgtaatttttgtataaggtatagaaaatataatttttttttttttttttttttttttgagacggagtgttattttttgttaggttggagtgtagtggcgcgatttcggtttattgtaattttcgttttttaggtttaagtgatttttttattttagttttttaagtaattgggattataggcgcgggttattacgttcggttaattttttttttgtttttgtattttttgtagagacggggtttcgttacgttgtttaggttgattttgaatttttgagtttaggtgatttattcgtttcggttttttaaagtgtcgggattatagatgtgagttattgcgttcgtcgataatataatttttatatgttttgtaattgattagttaaaaattaatatattttttaagttattatttgggggttggagaatttgagttttttgtttttttttttgttgttttaatgtttttttttttttatttagaggtaatttttaaagagagaggaaatgttattgtagggtattttagagaattggaatgttaatatgtagaaaaataatttttgttttggttattgggagatttatataatttttttggagttggtttgtttttaatattagttggtagttaaattattgtttatttgggttttgtcgcgagaattttagagtaaataagataagtaaaataaagtatttattaagtaaaggtttttatggttgatattttagtgtgggagaggtagatataatttatgtttgataatatagtaaatttgaaatttttgttagttgttataatttggataacgatcgttggagtttattttatatagtgatttgaattagattattttggatgttttttttttagttaaaaatttattttttaaaaaataaattttagaagtttaaggattatagaaggttattttaaaatagggtaggaattattatagttagaattaaatagatgtatttgagtatttttggataattgttagttgttgttagttattgttttgatttttcgtatgtttgattttttatatatagagtgtgtgtatatatataaattataatagaatgtattatatatatttatatattatataaatttatatttatatattataaatttatatttatatattatataagtttgtttattataagttttatataaatatatattttaatatatattttatatataattatatattgtatatatagaagtaagtatatggaaagtaatatatatatatatatatatatatatatatatatatatataaaattatttatttaataaatatttaatagtgttaagttttgttttaattatttgttatatagtagtggataatataaagatagagttttttttttagagtagagagaagatagttaagtaaagtatagtgtattatatagtgataggcgttatggagtgatattaggtaaagaggggagagatttttgtgagggagaagttattattttatgtaagttgattagagaaggtttcggtgtgaatggtatttgaataaagatttgtcggaggtaaggtagtagttatatagttgtatggggaaaagttgtgatttaaaggtaattatgggtataaaagtttgaagattatagggtttttgttatgttaatagaagagtaaggaggttagtggtgttggagtagagtgagtgagggggaagttgtaggagataagattagagagatagtagagggttgtattttatagggagattataaaattatatttttgtgttgagattcgattattaaagattaaggggggtaggattaggaggttatattaatgaagtttatgtagtagtttatttataaataaggaaaaggaaatgttaaatggaaagtaatgtgtatggatattagtttagtgttaaattttaattaattgtttagatttgttttaaaaatgtttttgaagttttttagttattatgggatatgtagtttattgtttgtttttttaagaaagtatttagattgtttaaaattttagttagaaataatacgaatataattttgggaatttgggtaatttataaaaattttagatttgttgtattagttttatttaagttttttagaattaggtttttgttttttggattgtggttgatttttttatttaattaaagaaaaaaatagaagtgaaaggatttgttattttgagagagtatagtttattttagaagtgatggttgtttgttttaagtttgcgggtttaaggtatgttattttttaagttgtttaatattaaaatagatgagttaaaaagaagggaatagtgtgtttaaggtttaaaaacgtaatgttgaagttgttggttttagttattttatttttttattttatagggttggtttttgttttttattttgtgggtttaaaattttttgtaaggttataagatgtatagtgtattcgtataaaattaggattgatttatagaggggaaatttatttggtttattaagatttttttagatggattttatatttgtttttttatattagttaagtttgtttgagtgaagtggtaatgttatttttaatttatattttaaaatttttatatagttaaattttaataaaaaatttgtttttgttttgggaattattatagatacgttttttttagggtatattgagcgaattttttaaattgtattcgtattgttttattttatttttttgtttttttatttaggttgttttatgagtttaatattatgtttttgttcgtaagtttagattttgtttgtagtttttatttttttatagttttttaattattaggtgaaagtggaatattttttattttttaatattttttgtttttttttattttttagataaatattgttttttaatatagttaaaatgaataaagggtttgtagtttagagatgtgattatgtatatgtattttttagttgttttttagaaattatattttttttttttatagtattatttttttttttttaagtttataagagggtttaggagggttgttttaaaggttgtggtatgattttaaattggaataagttagttggaaagttaagttaggaagattgtagaggtggaataaagggttggtaaaatagatgagttagaaagaagggaatagtgtgtttaaggtttaaaaaatagtaataaaaaataattgtttttatttagttagttttttagtatttgtatttttttaattttattgaaatttggttttgaggagttttgttttttagaatacggttttttaatattagtattattgatatttttggttagttatttgttttgggagatgttttatgtaacgtgagatatttagtagtatgtttggtttttatttattagatgttagttgttttttttagttttgattattaaaaatgtttttaaggtttgttagatgattattgggggtaaaatttatattttgttgagaattattgttgtagaagaaggttatttgaatgttttagttggtagtttgcgtaaatattatattaattatgtttttttttaataagtgaattttggaaatgaaagatttttgtgtgaaatttggtattttgggtggtggaattttgataggttttgtgatttaggtttgatttatatttaagaattaaggtttttgaatttttgtgttatatatgtttataattttatataggtagatatttttaggaataaatatattttagtttttatgttgtatgcgtattatattttttgtggtattatttttttaaaattatagttagtggatatttagttaggttattatggtaattaatgggttgggaagttgacgtatagagtgttttattttgtaatttttataatatttttttttagattttatgtggatagtaatagattcgttttatttagttttagtttatgtggtatttgaagattattttagttatttaatagatttaatattttaagtttagaatagttaggtgttgtgttttatgagaattattatatattatttttaagttaagtgttttataggtaagtaagtgattatgaattttgtaataataatttttttggttgtttagatttgaagattgaagttatatgtaatttgttattgtgtaattatatatttaattgtagatttttattattaatatcgattttttgtatagttataggtttttgtttttttgtttatatgtcgattaaataattgaattaatggaagtcgaaaattggattgtattagattagttaaagtgtttagtagtagtattaggttttatatttaatattattattttaattttttaagttttatgttatattataaaaggatttaggtgagtgtgttaaggttttaaataaagtggtaagagatataaatagtaagggttttaatagataggtgtttgaggttaatttttagtatatttttatttaatttgaattgttgagtaattaaaaagatagatgtttggtaatgattttagaatggtagatttaaaaaatatagagattattcgaatgatatggtttttaaataaagtagttattagtaatttagttaataaaagttagttaaagtaggaattgtaaaacgtggtttttttttttattaattttttgatatagtgtttaggatttttttttgaatatacgtatattgattgtcgtttttattatttaggataaattatatcgttgtgttgtattatatgtagaattgaaattgttaattgaagatttgagattagagtttagaaatatgtgaagtaagtgagaaattttaatgttttatgttttttttttttattttttgaagtttttttttttatagttgatatgatagtttttttttttgattaagtttttttaaagtattcgatttggttttgtatttttattttgttatttatataatatattattagattaatgaatattattggtattaataggtttcggaataagtaattgaggattagtaattaatttaagttaaaagaatgggagtagcggtatatgagtattttaattattagtgtttaatatgttgttggtagttttttagtttgtttatagaaatggatagggttgttgattgtatagttttatgggtattatttatataaaatttaatataaataatgttttttggagttattgtatatagtggttttgggaatgggaggttgttggttaatttagtttagtttgagaaatggagggtttgtgaagagtttttattttgtaaaaatatagggtttggtagaaaagagattataatttaaaaaggttaaataaaatttgtgatagtagatttattatgtaatgttaattttttatgttgtt

SEQ ID NO: 114 - DNA, 11836 bp, Artificial Sequence
  chemically treated genomic DNA (Homo sapiens)
  unsure (7603)
agtaatataaaaaattaatattatatgataaatttgttattataaattttatttaatttttttaggttataattttttttttattaggttttatgtttttatagagtagaagttttttatagattttttattttttagattaagttagattaattaatagttttttatttttagagttattatatataataattttaggaggtattatttatgttaaattttgtgtgagtagtgtttatggagttatgtaattagtagttttgtttatttttgtggataagttggaaagttgttaataatatgttaaatattagtagttagaatatttatgtatcgttatttttatttttttaatttgagttggttattgatttttagttgtttgtttcgaaatttgttagtattagtagtatttattagtttaataatgtattatgtaaatgataaaataagggtgtaaaattaagtcgaatgttttggaaagatttgattagaaaaaaaagttgttatattagttataaagaggaaagttttaaaagatgggaaaaaggagtataaaatattaggattttttatttgttttatatgtttttaagttttaattttaagtttttaattaataattttagttttgtatatgatgtagtataacggtatagtttattttaaataatgggaacgatagttagtatacgtatatttaaagaaaagttttgagtattatattaaaaaattggtggaaaaaaggattacgttttataatttttgttttaattagtttttattaattgaattattgataattgttttatttaaaaattatattattcgaataatttttatgttttttaaatttattattttaaaattattattaagtatttgtttttttgattgtttaataatttaagttgaatgaaggtgtgttaaaaattaattttaaatatttgtttattaagatttttgttgtttgtattttttattattttgtttaaagttttaatatatttatttaagtttttttgtggtataatataaagtttaaaaaattaaaataatagtgttaagtatggaatttgatgttgttgttaaatattttggttagtttaatataatttaattttcgatttttattgatttaattatttggtcggtatatggataagaaagtaagagtttgtaattgtgtagggaatcggtattaataatgaaaatttgtagttggatatatggttatatagtagtaagttatatataattttaatttttagatttgaatagttaaaggaattattgttataaagtttataattatttatttgtttatggaatatttggtttgaaaatgatgtatggtgatttttataaaatatagtatttggttattttaagtttggaatgttaaatttattgaatgattgaaatgatttttagatattatatgaattgaagttgaataaaacgaatttattattatttatataggatttgagggggggtattataaaggttatagggtaagatattttgtacgttaattttttaatttattaattattatgataatttgattgaatgtttattgattataattttgaaaggataatgttataaaaagtataatacgtatgtagtatgagagttgagatgtatttatttttggagatatttgtttgtgtaaagttgtagatatgtgtggtatagaggtttagggattttgatttttaagtatagattaaatttaagttataggatttattaaggttttattatttaaagtgttaaattttatataaaggttttttatttttaggatttatttattgaaaaaaagtataattgatgtaatatttacgtaagttgttagttaggatatttaaatagtttttttttatagtagtagtttttaatagggtgtagattttgtttttagtggttatttggtaaattttggagatatttttagtagttaaaattaggggaagtaattggtatttagtgggtaggggttaggtatgttgttaaatattttacgttgtatagggtattttttaaaataaataattggttaagaatgttaatagtgttgatgttaagaaatcgtattttagaaagtagagttttttagaattaaattttagtgaggttgggagaatgtagatgttgaaaaattagttgaatgagagtagttattttttgttgttgttttttaaattttaagtatattgtttttttttttttggtttatttattttgttaattttttattttatttttatagtttttttaatttaattttttagttggtttgttttagtttggaattatattatagtttttaaagtaatttttttaggtttttttataagtttgaaaaggggaaaatagtgttgtgggaagagaaggtatgatttttgagaaataattagaaaatatatgtatatagttatatttttgaattgtaaattttttgtttattttggttatattaaaggataatatttgtttggagaatgggaggaggtagaaagtattaagaggtaagaaatgttttatttttatttgatagttgagagattataaaggggtgaagattatagataaaatttgaatttacgaatagaaatatgatattgaatttataagataatttgggtaagggaatagggaaatgaaataaaataatacgaatataatttggggaattcgtttaatgtattttgaagaaaacgtatttatggtagtttttaaggtaagaatagattttttattaaaatttaattatgtaaaagttttaaaatgtaaattaaagataatattattattttatttagatagatttggttagtatagagaagtaggtataaaatttatttgaaaggattttaataaattaaataaattttttttttataagttaattttaattttatacgggtatattgtatattttatagttttataagaaattttagatttataaaatggaaaataaaaattaattttgtaaaatagaaaagtaaagtaattaaaattaataattttaatattacgtttttaaattttaagtatattgtttttttttttttggtttatttattttgatattgaataatttgaaagataatatgttttgagttcgtagatttaaaataggtaattattatttttgaaataaattatatttttttaaaataataaatttttttatttttatttttttttttagttaagtaaaaaaattagttatagtttaaaagataaggatttaattttaagaagtttaaatggggttaatatagtaaatttgaaatttttgtaaattgtttaaatttttaaaattgtattcgtattgtttttagttaagattttgaataatttaaatatttttttaaaagaataaataatggattgtatattttatagtaattaaaaagttttagagatatttttaaagtaagtttaagtaattagttaagatttagtattggattagtatttatatatattattttttatttagtatttttttttttttgtttataaatggattattatatgaattttattggtatagttttttaattttattttttttaatttttgatagtcgagttttaatatagaagtataattttataatttttttataagatgtaattttttgttatttttttaattttattttttataattttttttttatttattttgttttagtattattggtttttttgtttttttgttaatatgataggaattttatagtttttaggtttttgtgtttatggttatttttggattatagtttttttttatatagttatatggttgttattttattttcggtaagtttttgtttaaatgttatttatatcgaagttttttttaattaatttatataaaatagtaattttttttttatagaaattttttttttttttatttggtattattttatagcgtttgttattatatgatatattatattttatttgattgttttttttttattttagaggggaggttttatttttatattgtttattgttgtatggtaagtaattaggatagagtttggtattgttaagtatttgttgaataaatgattttatatatatatatatatatatatatatatatatatatgtattattttttatatgtttgtttttatatatatagtatataattatatgtaaaatatatattagagtatatatttatataaaatttataataaataaatttatataatatataaatataaatttataatatataaatataaatttatataatatataaatatatataatatattttattatagtttatatatatatatatattttatatatagagagttaagtatacggaaagttagggtagtgattgatagtagttgataattgtttagaaatgtttagatgtatttatttaattttgattgtaataatttttattttattttaaaatagttttttataatttttaagtttttaagatttattttttaaaaaatagatttttaattaaaaggaaagtatttaaaataatttgatttagattattgtgtagggtaaattttagcgatcgttatttaaattgtggtaattgataaaaattttagatttgttgtattattaaatatgaattgtatttgttttttttatattaaaatattaattataaaaatttttgtttaatgaatgttttgttttatttgttttatttattttgaggttttcgcggtaagatttaaatggatagtgatttggttgttagttggtgttaaaaataagttaattttaagaaagttatgtaagttttttaataattaaagtaaaagttatttttttatatattagtattttaattttttaggatgttttataatgatattttttttttttttagggattatttttaagtgagaaaaaggaagtattagaataataaagaaaagaataaaagatttaagttttttagtttttaagtaatgatttgagaagtatattagtttttgattagttaattataaagtatatgaaaattgtattatcggcgggcgtagtagtttatatttgtaatttcggtattttggaaggtcgaggcgggtggattatttgagtttaggagtttaagattagtttgggtaacgtggcgaaatttcgtttttataaaaaatataaaaataaaaaaaaaattagtcgggcgtggtggttcgcgtttgtggttttagttatttaggaggttgaggtgggaggattatttgagtttgagaggcggaggttgtagtaagtcgagatcgcgttattgtattttagtttgataaagaatgatatttcgttttagaaaaaaaaaaaaaagggagggaattgtattttttgtgttttgtatagaggttatataagaaatttcgtgttagaaattaaagtacgtagtatagttatttaatttatatttgtgtagtgaagagagtttcggattggattcgtttttgttggtgtttgggaattgatagttgtttttttattttagttatgtttagtttttagatttttaggtgttagatagaaagttggattagaatatttttttaagttattttttcgtagaaatttggtgttttattattaaaattaaatgtatgcgattttgtttttattttaattgttataatatttaaggagagataaacgttagtagataaaatttatttaatttaaaatgtttgttatgggttttttttttatattgatagtatttgttaacgtttatcgttttttaagcgttggtaaatgataaaatattattgttgttgatgtgtattattttatttaatttttataaaaattagaagatataaatattattatttttgtattatagattaaagtttaaggagattttataatttggataagattattaagtaaatggtagggtttggttttgaatttaaattttttggttttaaagttttattttttaattattattatatattttttttaaaaaataatatattaaaatgttaataatagaattattttaagttttatttttttggtgtgtggatttgtgtttttgatcgattgtaaggtttatgtgtaatataagtattttttttttgttgttgttaaaattagaattattttatttttatgaaggtaatattgatttttacgagtataattatttaaacggagatgggaatttttgttttaatttttttagaggtttgaagttagttttttagtatttttttttatataagggaaatgcgtttacggttagtttaaaatttgtagtaatttgtgtttgtttattagggattttttgggcgtaggtaagataatattttttttttgtagtttgaaagaagtgaaattaacggataattattatcggaatagagtttagattgtaatttatgagattttttagtttttttttttagtgaattttttcgagttttttttaggtgtagttttgaaggttaaaacgagatattaggattagtgggtttttaagaggcggtagtatagatataggtgtgtttttttgtttcgtggttttacggacgaaattttgaagtatttttagagattaagggtttatttatggggtttattaggttttttttttcgaggatcggtttttgatttaaagaattggggcgggggagaagtcgttttttagaagtcgttcgattatatcgttattatattttttttttttttttcgcggtttttcgtacgttttcggggagaagagtttttagtttttttcgtggatatttaaagacgtcgagtttcggtttttaatcgggagcggttttcgtggtcgggtcgtaggtatttatcgtcgttttcgtcgttgtgtcgtcgtcgcgatatgttgtttttcggtgcgtcgcggaatcgagaggttaggcggtaagcgttgtaggaattgtttggtcgttggtcgacgtaaggatagttgtaaggcgcgcggatgggtcggtacgtaggcgtattagttcgttacggtttcggaagcgtaggagaggtcgtcgggtggggttaggcgttgcgatagtcggcgtgaggaagtttagtgggttacgaacgtttggtatatatgtaatcgttttttcgggttgttttcgtttgtcggttatttttttttttcgtttttcgttttatgttttttcggggttacgtagaaagtgtcgtcgttttggttatttagagttttcgggtcgcggtcgtcgtacgtttgaaggcgggtcgtgtcggcggtcgttttagttttcgttttcgtttaggtcggtttttcggggttttttaatggtttttcggtggttttttaatggttttttcggcggtttttgcgtcgacgttaggagattttcggagtttggtgacgttacgagcgagtttttttatttaaatacgcggcgggggaataggttcgagggcggtgagtagtgataattgttaggcggagatagtgtagggaagagagattttagaaaggattaggattggcgggtatgtgtttatttatttttatttttcggtttttgtcgttttgggaaaagtgagagaanaggttgggttaagttcggtatgcggggtggggtttgggcgggaggcggtgtcgtacgtttcgttttttggtatggaaagtcgggttttgacgcgagcgtgcggtttcgggtttgtcgattggtcgttattttttttaagttgtttgtttaggaaggaataaatgattgttttagtaatttgtttttaagggttattgggtatttatatgtttgtgtgtgagcgtttttttttttgatgtttttatgagtattatattggtttatttgttttgtttatggttatttgaaattttattttttcggtttaattttttttcggttttatttattttagtaaatgacgttattcgtcggtcgtttaatttaaaaatttagagttttttttagtttttttttttttttttatataataattatttgtaaattttgtttgttttgtttttaatataaatttagaattagatcgtgttattgttttgtttaaaagttttttatgacggtcgggcggggtagttaacgtttgtaattttaatatttatgggaggtcgacgcgggcggattcgtttgagtttaggagtttaagatttatttgggtaataaggcgaatatcgtttttataggaaaaaaaaaaaaattagttgagtttagtgtttggcgtttgtagttttagttattcgaggggagggttgggggtcgaggtgggaggattttttgagtttaggaggtcgagaatgtagtgagcggtgatcgtatattgtattttagtttgggtaataaagtgagatcgtgttaaaaaaaaaaagttttttacgattttttattgtatattttatgttatggtttgtggggttttatttttttttattgtattttaattattttttttgtttttataataagttaagtttgtttttattttaggaatttatattattttttttatttgaaggtttttggttttaaatttgcgtggttggtttttggttatttaggttttagtttaaatgttaggtttttagtgaggttttttttggttatttaattattgttttattttatttaacgaatattatatttattagtatttagtattttttaggtgttaggtagagttttgaatgttgaggatgtagaggtgaataaaggaaaatttttgtttttttggcgttgatatattttaacgatttatttaggaatatttataaatagtgttattataggtagtgagtaacgggagagtggtagatgagattagagaggtagggggaaggtgttttgtgaggattttggatattatttaagtgaattgagaagttattggagtatgattttttttttttgagatagggtttcgttttgttgtttaggttggagtgtagtggtacggttttggttcgttgtaatttttgttttttaggtttaggtaatttttgtgttttagttatttaagtagcggtaattatagatatgcgttattatattaggttaatttgtatatttttagtagagatggggtttcgttatgttggttaggttggttttgaatttttggttttttaaagtgttaagattataggtataagtttttgtgtagggttagtttgatttattttataaatagttattttttatgtttttaaaggaggaagatagttttagggttatttgttatgtaattattttagaatttttagtgtttatttttggttgttttttttaatattgttttgaagagaattaattttggttagtttattagtaatataaaataattagttgttatgttgtggggtaggaatttgaatagggtataatagggatattttgtttttgtttttagtttagaggttaatttggaatttgaagggtttagtggttgatgttggttgttagttggaggtttttgtttttttttatttggttttttgtgtgtggtttttgtatgggttggattggtttatttataatatagtggtttggtttttttagcgtgagtattttagaatgagagtttgtattagcgtatttttttgagaatttaattttagttatatagtattgtttttattacgttttatttttgggagtagttaataagtttgtttaggtttagggaaatggattagaaatattgttgtagttatttttggaaaatataatttgttatagttaatttttaaataaaattttaatgttaaatttaaaatatagtatttaattaaaatattaataatattattatttattgaattttagtttgtgttagatattatatattaatatttttttttagtttatagtatagtattgtaatgtagatattataatgtataatttttataagagagatttagaatttagaaattttaagtagtttgtttatgtttatatgtttggtaaattgttgtagtataaattaaagtttatatttttttttagtgtgttttttagtgtttgttatttgttatttttgttttataaaagaattaatatggtatgatggttgtagtgtgtttattttgataagatttggttatagtagcgattttgatattttttttggtatattatagtggggttgttttgggaattattttttttaaggaaggaaatttttatagttttgaaattaaggggtaaaaagaagaaagtgtttataattgaaggtgttggtatatattttgattgatttgggttgtatttgttgtttttttgggtattatttattttaatgattgtatggttcgttttttaatttagggtttttgtttaaatgttattgttgtagaaaggttttttttattttttgtgtcgaaagggtttttttattattgtttttttattttgttgattattttttataatttttatattatttgattttaaaaataaaaaattaatttatttatttgtttattttattttattggaatgtaaattttaagtaggtagaaatttttttattttcgtttattgttatatttttagtgtttagaatagtgtttgatttcgagtcgtttttaagtaaatattattgatttagtaagtaaatggatggttagtttgggttattttgtttatgttgatttgcgtgattgattagttttatattttttttaagaaattaaagaatagtatggttgttttttttttatttatattttaggaggtatttaattgaaaggaatatttgttttattgttgtaattaaattagatgtttttttttattttattagattaaggagatgatttggagaattgtattttaagattttttgatttggatttaaaagatatgagttttattaattttagtagtagttttaaagtagaattagatggtagtataaaaaagaaatattcgtttgtaaagaaaaaggtagaatttttatgaatgttttatgattatgtatgtgtggttaacgtagatatatttggaagtcggttattaaggttgttttttagtttaaggtaaagtttagttaggaatattaattagtgatgttaattttattttaggtaaagggtaattataggtaaggtgtggttttggaatagttatggtggagtatttgaggagggtggattttagatagatggattagattttattttttattttttaggttaaaaaagattataaataaagttgaaaattaaatgataagtgaagaaaaaagttggtaattatgattaataaaagattattaaaaatacgtattagtaagaagataaatgttataatggaaaaataggtaatagatttgaataggtaagttagaaataaataaatagattaagtaggaaaaagtatttagtattattattaattaaaaatattaaaaaaaaaaatagggtagtattttttttgttttttatttggattaatattaaaaatattgatgataaaaaatattgatagaatttagtgaggttatggataaaatggtatttatatgtttttttggttagagtataaattggtatattttttttggaagttattattatagattaaaattttatgttttttgattttttaatttttattttagatattttaagtaggtggttaaagatatagaaagatagatgtatggaatgtttatttaatatggtttttaattgtaaatattagaaataatttaaatgtttattagttggtaattggttaagagaattttttgtttgattgttttataataagtataagtaatttttataaaaatag

SEQ ID NO: 115 - DNA, 15649 bp, Artificial Sequence
  chemically treated genomic DNA (Homo sapiens)
tttgatggtatttattagttatgtgagtatgggaaaataattttatgtttttaagttttgttttttttatttataaaatgcgaataataaaaatattttttttagaagaatgaaatgagataatttattgtgttatgtatagagtaattatatatcgttttaattttttttttttttttttttttttttttgttttgagatttagtagttgaagatagaagtgaaagattttttttgtaggtttgaatataaatttttattttttttatatttagttataaagggttgtagttatagtttttttacgatatttttattagaaataaattagattaaggtttggtttagtggtttacgtttataattttagtattttgggaggtcgagatgtgtagattggttttgtttgtttgtttgtttgtttgtttttaattttgagatggagtttcgttttattatttaggttagagtgtagtggcgagattttagtttattgtaagtttcgtttttcgggtttacgttatttttttgttttagtttttcgagtagttgggattataggcgtttattattgcgttcggttaattttttgtatttttagtagagacggggttttatcgtgttagttaggatggttttaattttttgatttcgtgattcgttcgtttcggttttttaaagtgttgggattataggcgtgagttatcgtattcggttcgagatgggtagattatttaaggttaggagtttgagattagtttggttaatatggtgaaatttcgtttttattaaaaatataaaaattatttggttatggtggtatgtatttgtaattttagttatttgggaggttgaggtaggagaattatttgagtttaggaggtggaggttgtagttagttgagattatattattgtattttagtttgggtgatagagtaagattttattttaataaataaataaataattatataaatatataaattagattagtttgggtatggtggtttatgtttataattttagtattttgggaggttgaggtaggaggattatttgagtttaagagttcgagattagtttgggtaatatagtgagattttatttttatttaaaaaaaaaaaaaataaataaataaaaaaaaaaaaataggtgtagtggtttatatttgtaatattagttagtattttgggatgttaaggcgggcggattatttgaggttaggagtttaagattagtttggttaatatggtgaaattttgtttttattaaaaatataaaaattagtttggcgtggtggtgggtatttgtaattttagttatttgggaggttgaggtaggagaattgtttgaatttaggaggtagaggatgtagtgagttgagattatgttattgtattttagtttgggtaatagagggagatttcgtgaaagaaaaagagatagagagagggagagagagagaaaaattagattaattgttttattttgtgttattgaatttaggtgttgaaaatattaataaaataatttgttgataaaataaagtttagtttatttttattgtagtgagaagagtattattttgatagagttgtggaggtttaaagtagggagtatatagtggtatatattgagtttttgaaatttggtttaagtgtaggtttttttaatgcgggttgggggttgattaggatggggtaaggattatgatataattatttaggattggtagatataatagagtattttgaggttagcggttgtataaatatttaacgagtttttgtttattgtttagagagagttaatttattaagacggggaattgtaatagggaaagagtttaatatttatagagttagttaaatgagagagtagaattttattattatttaaattagtttttttgaaaatttggaggttgggttttttaaagatagtttggtaggtagggggttagggaatggatgttgttaattggttggggatgtaattataggggtatggaaaatattttttgtgtgttaagtttgtttttgggtggggagttataggattagttaagagttttgggttttggtggagttatttgattgttagaaatgttaaagtttgaaaggatttattaagaggttaattttaggttttataatagtgatgttatttatgggagtaattgggaaagttgtaaattttgtgatttttagaataatggttggtaattatttaattatgttaatacgttagtagaatttaggttttttttataattttaaatttgtggttttttattagttttataaaggtaagtttggtttttttttatttttttttttttgagataaggtttcgttttgttgttaaggttcgagtgtagtgtgtaattattgtttattgtaaatttaaatttttgggtttaagtgatttttttgttttatttttttgagtggatgggattataggttggagtgtaaaggtgtaatttcggtttattgtaattttcgtaattttggtttattgtaatttttgttttttgggtttaagcgatttttttgttttatttttttaagtagttgggattataggcgtttgttattatgtttagttaatttttgtatttttagtagagattgggttttattatgttggttaggttggttttaaatttttgattttatgattcgttcgtttcggttttttaaagtgttgggattataggcgtgagtcgttatgttcggttagtttttatttttaatttattgaaatagttattatgttaatgtagataataagttgtgtgggtgtagatggtttttatttttagtgtttttagaaaatttaataagtaaaattaagggaaatgtatttaggatattgagggtatttgtttttgtagatcgagtttaaaatggaagatattattttggtaatttagaaggtgatttgaattttagacggatgatttattttttggtttatttattattttttattatttgtttattttagttgaatgttattagttttgtgaggaagtagattaggaatgtttattttcgttgggtgtggtggtttatgtttgtaattttagtattttggaaggttgaggttggtggattataaggttaggaatttaagattagtttggttaatatggtgaaatttcgtttttattgaaaatataaaaattagtcgggcgtggtggcgggcgtttgtagttttagttatttaggaggttgaggtaggagaattatttgaattcgggaggtggaggttgtagtgagtttagattatgttattgtattttagtttaggcgatagggtaagattttgtttcgataaaaaaaaaaaaaaaaaaggaatgtttatttttttgtttgagatggtatagaaaaatttttttttatatttaaatagtggaagaaggggtatttttaaatttaattttttatagatagtatatatagtatttaatattttttggatgttaaagaaaaaaatattttgaaatttgttaaaatggtaaggaagaatttatttaggattaaaggggagattatgttgtattttgaatataataatgataagtgggatttatagttaataagtagagtgaggggttattgtatggaaaattattaaaaggagatttttgttaaattaatttaataggatttttgttgaaggtaggttagggttattagatattaaggatgggggattttttttaaattgatttagtagaattttttttttattgagtttattttttttttttttttttttttttttttttttgagatagggtttcgttttgttttttagattggagtgtagtggtgtgattatggtttatggtagtttttattttttaggtttaagtgattttattattttagttttttgagtagttgggattataggggtttatcgttatattcggttaatttttttattttttgtggagatagggtttttttattttgtttaggatgatttgaaatttttgggtttaagagattttttatttcggttatttaaaatgttgggattataggcgtgagttattgtgtttggttatgagtttatttttttttttttttttgagacggagtttaaggttagtttggttaatatggtgaaatttcgtttttattaaaaatataaaaaaatgagtcgggtatggtggcgggtgtttgtaattttagttattggggaggttgaggtacgagaatagtttgaatttaggaggtagaggttgtattgagtcgagatcgtttcgttgtatattagtttgggtaatagagtgagattttgttttaaaaaaaataaagatttttcgtgaagtagtgttaagtggatttaggagaaaaatgaagatgattttttaatggttttttaaatgtataaagtttttttatttagggaagaaagatataaagatgtagtttaggcgcgatgatttaggtttgtaattttaatattttgggaggtcgaggtagttggattttttgagtttaggagtttaagattagtttaggtaatatggtaaaattttatttttattaaaaatataaaaattagtttggcgtggtggcgggcgtcgtatgggtattatggttgttttagttatttaggaggttgaagtgggaggattatttgagttcgggaggtcggggttgtagtaagtcgtgttcgtattatggtattttagtttggacgatagaaaaagaaaaaagaaataaaggtataaaagaaaaaaaagaaaagtaaatagttttttttaggggatgaagtaggtttatttcggtgagattgttgtttagaatttaggagagttattaaaggtagaagatcgtttttggggttcggttatttgaatattataagttttagtaagcgtcgcgcgggggcggggtttgttgatcgttgtgacgtgtgggcggggtaggcgggtcgggtttttttttgggtgtttagtttcgttttcgttttattttgttttgttgttgtcgcgtcgttgttggttgttgtttttggtgagtgttttaagtggaaaggggtagttaggttttcggggtgtttatatttagatttgtagttttgagaaggggttacgggggtagaggtgtggtaagtttcggtttttatcgtagtttattttttggggtgatagtgggagtggtgttttgaaggttttggagtttttttcgcggttcgggagggttgcggggtagttttgttttgcggagggtagcgttgtagtgttgtgtggtagggtgggaggtttttcgggaagaagtgatatttttggcggcggcgagggttttgaggcggcggttgtcgttttacgggtcgtggcgtttcgttttttttcgcgggtttaggttgtggtggtttcgtaatttttcgtttggatgttatcgtcgttggtttcgaggcggaggtggagttttgttgcgttattttgagtaagttattttttttttgggttttagtgtttttttttacgagtaggtttgatttttgaagcgttttgttttttgtatgttgtagttgtcggagaagacgttttaggtaggaggaaagacggtgtcgtgatttgtttttatagttaatttattgtttttttattattgatttagtttagtttgggagttaatgtttttattcgtatattattttaattttattggacgtgttaatttttttttattatttggatttttgttttatatgtaagttaataagtgattatggttggagttgagtaaaatatggataatataatttattttattattggaaatattattgtaagtaaaggattttatgtggtaggtttttgtagtttgtggagaatatatgattaaggaatatttagatggtttagttttttaggtatttttaagggatttggaaattttattttttggtagatatgatagttgtggaatggaaagggttttgaaaaaggtagtcgataattttgagttatttggtattaataggttatattgtttttcgagttagatagtatatttgtggttttttaaaaatttaatttggttgattaggcgcggtggtttacgtttgtaattttagtattttgggaggtttaggcgggtagaattatttgaggttaggagtttaagattagtttggtaaatatagtaaaacgttgtttttattaaaaatataaaaattagtggagcgtggtggcgggcgtttgtaattttagttatttgggaggttgaggtaggagaatcgtttggatttagatagcggagggtgcggtgagtcgagatggcgttattgtattttagtttgggtaatagagtgagatttcgttttaaaaaataaataaataaaaatttaatttggtagtatgtattgatagaatgttatgtatttttaattatttttagatgaaaagagagttaaatgaatttttttatttttttttttttttatttaggattattattatattaggtaaggtttttgaagattttttagttttagttatgtattttgttgatgaggaaataggttagaaaagggtattgtgatttggttaagtttttagagtggtagaattaagataggaatttagtttttttggttgttagtttagttttttttttattatattttaaatattgttattgtttatgttatagggatatggtatgttagaattatttttgttaagggaaaagtggatggttttagtaaaatggagattagtatatagttttgagttttttagagtttttagttgttcgtatttgatgttttagaattattttttttatttttttttagaattggcgttagtattatggtggtgtggatgtgagatgagggtttgtttagaaaaagttggatagtaaatttaaataattgttaatgagtagtaataaaggttttttggggtgtaaaatttttgtaagatattttgaaatatttttatattttaggtaagggtttagaattaatttggaaattttgggttagagtaaatggttcgataatttgaagattagtgattgtgtttttgtttttgttatttgttttagggttatttatatatatttatagtatttattgttggtattttttaaggttggttatgtgtaagtatttttgttatggttagggagaaacgggatttaaattaatttatttatttttgttaattgttaatcgtttagaaagaaaagtaagtagaaggtcgggtatagtggtttacgtttgtaattttagtattttgggaggttaaggtgggtggattacgaggttaggagttagagattaatttggttaatatagtgaaatttcgtttttattaaaaatataaaaattaatcggatatggtggtatatgtatgtagttttgggaggttgaggtaggagaattatttgaatttaggagatagaggttgtggtgagttgagattatattattgtattttattttgggtaatagagagagattttgttttaaaaaaaaaaaaaagaaagaaaaaaagtaagtagaaagataaaggaatttaattaaattgggtttgatttttatttttgtttttattgtttttaaatgaagaattgatttgtatgttttttttgtttgtagaagtatttgatttttttttgtgaattaatttgtagtttttattttttttgaaatatatgtttattggtataaaaaaggttaatgtaaatatgttggttatttaaaaaattttttgttaaaaaatttattagtgtagtttgtagatgtagttagaaagagtagaagtaggttgggtacggtagtttatgtatgtaattttagtattttgggaggtcgaggtagatggatcgtttgagtttaggagtttaagattagtttgggtaatatggtgaaattttgtttttataaaaatataaaaattagttaggtatatgtttagggttttagttattttaattgaggtgagaggattgtttgagttagggatgttaaggttgtagtgagttatatttatgttattgtattttagtttgtaagattttatgttaaaaaaaaaaaaaaaaaaaaagtaagagtagaagtagaataggttgttgttttttttttttaggaagatataagaggatttatgtttttatggaatagttttgggagtagtatattaggtttgaaaagtttattagatgaagatgtgttaggtttttttggaagttaggagatagtttaggggatttatttaaaaatatttttttattattgtttgtttttttgagggttttaatttttttggaaattgagttgaaaaaaggtaatgattatgttagaggttaaataaagttgtttttgatagtttgtggaatttgtgtattattttatttatgtttgatagttttgtttttgaaaatttttatttgttttttttgtttattttttatgtggttaatttttgatttgagggttggaataaggaattaggtaaaatattattttataatttttaggggatttagttcgttttattaattttttataatttagtagttttttgggtttttaaatttaatttttgtttttatatttttttttttttttttatttttatgaattgttgttaagttagaaatggatggtagataggttttatagtgggaaaggtggttaaaggaggggaagttgatgtttaagttattttaatttttatgggttaggtgtagtgatttacgtttgtaattttagtattttgggaggttaatgcgggaggattgtttgagtttaggaatttaagattagtttgggtaatatagggagattttatttttataaaaatataaatattaggtgggtatggtggcgtatatttatagttttagttatttgggaggttgaggtggagggttatttgagtttgggaggttgaggttgtagtgagttatggttgtgttattgtattttagtttgggtgatagagtgagattttgtttttttcgtaaaaaaaataattttttttatatatttttttttttttgtttataaatatttatttttagattattttgttagaaaggtaattttttaagttattgttggagtttattttttttaggaattttattattgggaggaagggaagattaaagattattgatttgaaaatttagtagatgttttttttttaggaaaagttggaatatttttttattgattaagttcgggttggtatggttatgttttagtttatttatggttttttgtgtttatagtttggtaaaaaggagagaagagaagttattgttgtttttatttatttgtttttttaaatttttttttagttttggtagaggagaattttaattttattttaagaatgattgagtttttaatattttatatgttattggatgttttttgagttttttttgggaaggtgatgagatttttgaaatgggaaattttatggggttttttgtatttttgataagtaaggaattaaagttgtttatttttttagatagattattaggtttttaggtgaatgaaaatagttagaattttttttgattatatatttaagttttagaatatgagttttttcgtgttgtttatatatgtgttgtttttttttaagcgttttgtttatgagttaatttagattggttgtttttttttttttttttttttttttttttttttttgagatagagttttttgtttttgttgtttaggttggagtgtaatggtataatttcggtttattgtaattttcgttttttgggtttaagcgatttttttgttttagttttttgagtagtttggattataggcgtttattattacgttcggttaattttttgtatttttagtagagatagggttttattatgttggttaggttggtttcgaattttttattttaagtgatttatttattttagttttttaaagttttgggattataggtgtgagttacggtatacggttagattggttgtttttttggtaatgaaagagaaattatattaagttattttatgtttttagttggttttgttttttagagtagtatttatttttataatagtttgttagagtttgagtgtgtgtaaggtaggtaatggagtgtgaatttgatgggtttttaaggaaattaaatttgttttttttggttttttggtattatgttatttgaattagttatgttagttgaattagttatattaagaagtgatttagtatttggagattattatttttttattttattttagaaaagagaaagttgagaaatagtagtttttttaagggttaataataaattaagagggtttaaaaaaataaaatatatatatttttagttttagagttatttttattattgtttatttataaagttttttttttttttattttttgatgaatgatgtgtatattttgttagtttatttatttaataaatatttaattagtgattattatattttaggtattgtgttatgtatataatggtgatagtgttgtgaaggaaaagaaatggggataaggtatttggtatttgtgtataatgagggttttttttggatgttatgggagaatgggtagggaggttttttagtttgtagattttttatttttaagtggtttattgatatatggaggttagcgtatgaggggtagtttcggaagttatttttttttttttttttttttttggagatagagttttgtttttattgtttaagttggagtgtagtggtgcgattttagtttattgtaattttcgttttttaggtttaagttattttgttttagttttttgagtagttggaattatagatgtatgttattatatttagttaattttttgtatttttagtagaaatggggttttattatgttagttagtttgtttttgaatttttgattttaggtgatttgtttgttttggttttttagtgttgggattataggtatgagttattatacgtagtatttagaagaatatttagaatatttttatttgagtgttttttatgattcgtaaaggataagttaagtaattttatacgtatagataaattggtgttttaggtttaggatagagggatatgttggtttttatatgacggtagattatttggaaataaagggtttgtaagttgagaaatttttttgtttatttttttatagtatttaagagaaatttttattgtatataggtaatagtttattatagggaaaaattttgatttagattggaatgtgaatatttttttatcgttgaaaaatttttttgagtcgggtatggtggtttatgtttgtaattttagtattttgggaggttgaggtgggtggattatttgaggttaggagtttaagattagtttggttaatatggtgaaattttttttgtattaaaaatataaaaaattagttgggtatggtggcgtgtatttgtagttttagttatttaggaggttgaagtaggagaattgtttgaattttagaggcggaggttgtagtgagttgagatatcgttattgtattttagtttggggaatagagcgaaattttgtttaaaaaaaaaaaatggaaagaaaaatttttgaggtttgaggttgaggatgtggttaaattgtgttataaattagaaagttaatgtattttttagttttttaatttaattttaagaatagatagtttagtgttttaaagttttgttgttttttttatgaaaaaattgatttttggggagttggaagagtaggtttggttgtttagattttaaagtaaaattagtaaatagataggatggggttagaataagtattatggttgtttgggaggttttgtttttttggttattgtatttatttatttttaaaaattatatgtgtgttagtcgggcgcggtggtttatattgaagtaggaagagttatagataaaattttttagatatcgagttaacgaaggatggggtttattaggtcgggggtattagtaagatttttgttttaagagttgagtttttcgagtgagtaatttttgttttttttaagggttaataattttaagggggtacgcgtgagagggtcgtgattaattgagtaagtagggggtatatgattgggggttgtatgtgtcggtaattagatcgttataaaataggatagggatttttatagtgtttttttatataatgtttgtaatttatagataatataattaattaggttaggggtcgatttttaattattaggtttagggtgtggcgtcgggttgtttgtttgtggattttatttttgttttttagtttttattttttttttttttggagatagaaattgggtataagataatatgaggggtggtttttttttttaatgtttgtaattttagtattttgggaggtcgaggtgggtttattacgaggttaggagatcgagattattttttttaatacggtgaaattttgtgtttattaaaaatttaaaaaattggtcgggtatggtggtaggcgtttgtagtgttagttattcgggaggtcgaggtaggagaatggtatgaatttgggaggtagaggttgtagtgagtcgagatcgcgttattgtattttagtttgggggataaagcgagattttgttttaaaaaatatatatatatataataattatatgtgtgtttgtatgtgtatataattttttagtatatattaatagttgaatttgtaagatattatatagtatttgtatgtgtatagttttttttttattttttgtgtataattgaaatattttttttatgttttagtaaaattttaaattgagaattacggatttattaaatgttagattagttagttatttagaaaatagtgtatgtgatttgtttaaggggtaggaagtattaggtgttaataattaaaattattttgttttttttttttttttgagacggagttttattttgtgttttaggttggagtgtagtggcgtaatttggtaattttggtttattgtaaattcggtttttcgggtttttgttatttttttgttttagttttttgagtagttgggattataggtattcgttattacgttcggttaattttttgtgtttttagtagagacggggttttattatgttagttaggatggttttaattttttgatattatgatttatttatttttgttttttaaagtgttgggattataggtatgagttattgtgttcggtttattttgttttttttatgtattgtttttgattttaaaatggtttttttttttttttttttttttgatagttttattttgttttttaggttggagtgtagtggtatgattttggtttattgtaatttttgttttttgggtttaagcggtttttttgttttagttttttgagtagttgggattataggtgtttgttatcgtgttcgggtaattttcgtatttttagtagagatagggttttataatgttggttagattggtttcgaatttttgattttaggtgatttatttgttttagttttttaaagtgttgagattataggtgtaagttatagtgttcggttttttttttttgttttgttttgtttttttttttttttttttttttttagacggagttttattttttttgtttaggttagagtgtagtggtatgattttggtttattgagattttcgtttttaggtttaagtaatttttttgttttagttttttaagtagttgggattgtaggtatgtgttattacgtttagttaattttgtatttttagtagagatggggtttttttattttggttaagttggtttcgaatttttaattttaggtgatttatttgttttagttttttaaagtgttgggattataggtgtgagttattatgtttggttttttttgtttgtttgttttaatagagatagttttattatattgtttaggttggatttgaatttttggtttaagtaatttttttattttagttttttgaatagttaggattataggtatgtattattttagttttttatttcgttgttgttgttgttgttattgttattgttttgaggtaggggtttgttttgttgtttaggttggggtgtagtggtataattttggttcgttgtagtttagattttttaggtttaagttatttttttattttagtttttcgagtagttgggattgtaggtgagtattattacgtttagttaatttttgtagttttttgtagagatggggttttgttatgttgtttaggttggttatgaatttttggatttaaaagatttattcgtttttgttttttaaagtgttgggattataggtgtgagttattgcgtttagttataatttttttatttttgattatattttatttgtattataatttagaaaggtgaaatatagtgtattatttttatttatagttagggatttaaatttgtttgttgttttttaaatgtgggttgtatttttttgtttttttgttgttatttatgttgttttttttatttagaatgtttttatttaaaaatttatttgtcgaaattttaattttttttgagggttaatttaagattttttttattttttgaagttttttttatttttttaattagttgtatttttttttgttttgaattcgagagtattttgtattttttattcgatttatttggtagttatttgtatatttttttattttttttattggattgggattttttttaaggttgtattaggaaaaaaaaatttacgattataatagtaataattatataattaattataattaacgttttttaaattttttatgtagattttgtgttaagtattttgttatttaatatgtattaattttgtgtgaagtgtttataatggtagatattgatttaagggttggatattttatattattttatttatgttttataaaaaattaaatggggtagatgttatttttagttttaatttatagataaggaaataggtatagagttagtagattatataaattgtttaatgttataaatttaataggtggtgaagttggaatttgaacgttattattttaatttagaatttatgtttgttattattgtatgttaaataatttttttttatttttatttttaggttttagtagagtattttatgtatggaaggttttgataattataggataaatgggattgaatatagaagatgaaatttagagagatggatttttttaaagttatagggtttgttgggatgaaaaatttagaatttaatagtttttagtttaggttattttatttaggttgttttgtttatttaagttatttggagaaaggggaattaaagtagttataagtttttgtttatgtgagggttgtggtgtttgtggtgaagaagttaaagatattgttagaaaattttcgtagtataggaagttgtgattgagatggttcgaagtgaaatagaaagtaagttgtgtaattttagtatttgttaggattttgttttttttgatttgttttgtatagaatgttttttggatgaaagtttagaaattattaatattttagataatgttttttgagttttattttgttttatattttataatagg

SEQ ID NO: 116 - DNA, 15649 bp, Artificial Sequence
  chemically treated genomic DNA (Homo sapiens)
tttgttatgaaatgtggaatagagtaaggtttagaaagtattgtttgaaatgttggtgatttttgggtttttatttagggaatattttgtgtaaagtaagttaggaaaagtaaaattttgataaatattgagattatataatttgttttttgttttatttcgagttattttagttataattttttatgttacgagaattttttgataatatttttaatttttttattataggtattataatttttatatgaatagaggtttatagttattttagtttttttttttttaaatgatttaaataagtaaggtagtttagataaaatagtttgagttgggaattgttaaattttagattttttattttaataagttttatgattttaggaaagtttatttttttggattttattttttatatttaattttatttattttataattattaggattttttatatataagatattttgttaggatttggggatgggaatgagagaaaattatttgatatgtagtagtgataagtatgggttttaaattagaatggtggcgtttaaattttagttttattatttattaaatttgtggtattgggtaatttatataatttgttggttttgtgtttgtttttttatttgtaaattggggttaaaaataatatttattttatttagttttttgtgaggtataagtgaaataatgtaagatgtttagtttttaaattagtgtttgttattgtaggtattttatataaagttgatgtatgttgaatgataaagtatttagtatagagtttgtataaagggtttaagagacgttagttatagttagttatatagttattattgttgtagtcgtgggttttttttttttggtataattttaaaaagggttttaatttaatagagaggatagaggagtatataaatgattgttaaatgaatcgaataagaagtgtaaaatgttttcgggtttaaaatagggagagatgtaattggttaggaaaataaagaaaattttaaggaatgagaagaattttagattagtttttaaagaggattaggatttcgataagtgagtttttgagtgagggtattttaggtgaaggaaatagtatgagtaataataaagaaatagaaaaatgtaatttatatttggaagatagtaaataagtttggatttttagttataaatggggataatatattgtgttttatttttttaggttatagtatagataaaatgtgattaagaataggaaagttgtggttgggcgtagtggtttatatttgtaattttagtattttggaaggtagaggcgggtggattttttgagtttaggagtttatgattaatttgggtaatatggtaaaattttatttttatagaaaattataaaaattagttgggcgtggtggtgtttatttgtagttttagttattcgggaagttgagatgggaagatggtttgagtttgggaggtttaggttgtagcgagttaagattgtgttattgtattttagtttgggtaatagagtaagtttttgttttaaaataataataatgataataataataataacgaaataggaaattagggtagtgtatgtttgtagttttagttgtttaggaggttgaggtgagaggattgtttgagttaggagtttaagtttagtttgggtaatatagtgagattgtttttattaaaataaataagtaaaaaaagttaggtatggtggtttatatttgtaattttagtattttgggaagttgaggtaggtggattatttgaggttaggaattcgagattagtttgattaagatggagaaattttatttttattaaaaatataaaattagttgggcgtggtggtatatgtttgtaattttagttatttgggaggttgaggtaggaaaattgtttgaatttgggagcggaggttttagtgagttaagattatgttattgtattttagtttgggtaagaagagtgaaatttcgtttaaaaaaaaaaaaaaaaaaaaaaaagtaaagtaaagtaaagaaaaaaggtcgggtattgtggtttatatttgtaattttaatattttgggaggttgaggtaggtggattatttgaggttaggagttcgagattaatttggttaatattgtgaaattttgtttttattaaaaatacgaaaattattcgggtacgatggtaggtatttgtaattttagttatttaggaggttgaggtaggagaatcgtttgaatttaggaggtagaggttgtagtgagttaagattatgttattgtattttagtttgggggatagagtgagattgttaaaaaaaaaaaaaaaaagagaaattattttggagttaaaaatagtatataaaggaaataaagtgggtcgggtatagtggtttatgtttgtaattttagtattttgggaggtagaggtgggtggattatgatgttaggagattgagattattttggttaatatggtgaaatttcgtttttattaaaaatataaaaaattagtcgggcgtggtggcgggtgtttgtagttttagttatttaggaggttgaggtaggagaatggtaggaattcgggaggtcgagtttgtagtgagttaagattgttagattgcgttattgtattttagtttgggatatagagtgagatttcgttttaaaaaaaaaaaagaaataaagtgattttaattgttgatatttaatattttttgttttttaaataaattatatgtattgttttttaaatgattagttggtttaatatttagtgagttcgtaatttttaatttagggttttattaggatatgaaaaaaatattttagttgtatatagaagatgaagaaagagttatatatatgtaaatattatataatattttataaatttagttattggtatatgttggaagattgtgtatatatataggtatatatgtaattgttatatatatatatattttttaagatagagtttcgttttgttttttaggttggagtgtagtggcgcgatttcggtttattgtaatttttgttttttaggtttatgttatttttttgtttcggtttttcgagtagttggtattatagacgtttgttattatgttcggttagttttttgaatttttagtagatatagggttttatcgtgttagaaaggatggtttcgattttttaatttcgtgatgagtttatttcggttttttaaagtgttaggattatagatattaagggaggagattattttttatgttgttttatgtttaatttttgtttttaaagaaaaaaaaagtaaaaattaaaaggtagaaatgaaatttataagtagatagttcggcgttatattttgggtttggtagttaaagatcgatttttgatttaattggttatgttatttatagattatagatattgtatagaaaagtattgtgaaaatttttattttgttttgtgacgatttaattatcgatatatgtagtttttagttatgtattttttgtttgtttaattgattacgatttttttacgcgtatttttttagagttgttagtttttaaaagggataggaattgtttattcggggagtttagtttttgagataggagttttgttgatgttttcggtttaataaattttatttttcgttaattcggtgtttgaggagttttgtttgtggttttttttgttttaatgtaagttatcgcgttcggttggtatatatataatttttaaaaataaataagtataataattaaaaaaataagattttttaaataattataatatttattttagttttattttatttatttattggttttattttgaagtttaagtaattaggtttgtttttttaattttttagaagttagtttttttataaagaaggtaataggattttggagtattaaattgtttatttttgaaattgagttaaggaattaaaaaatgtattgattttttggtttgtgatatagtttagttatatttttaattttaaattttaaaagtttttttttttattttttttttttagatagagtttcgttttgttttttaggttggagtgtagtggcggtattttagtttattgtaattttcgtttttggggtttaagtaatttttttgttttagttttttgagtaattgggattataggtgtacgttattatgtttagttaattttttgtatttttagtatagagggggttttattatgttggttaggttggttttgaatttttgattttaggtgatttatttattttagttttttaaagtgttgggattataggtatgagttattatgttcggtttaaaagagttttttaacggtgggggaatgtttatattttagtttaggttaagatttttttttataataaattgttatttgtgtataatgagggttttttttggatgttatgagagagtgggtagggaggttttttagtttgtagattttttatttttaagtggtttatcgttatatggaggttagtatatttttttgttttaagtttggagtattaatttatttgtgcgtgtaaaattatttaatttgttttttgcggattatgaagaatatttagataagagtgttttgagtgtttttttgagtgttgcgtgtggtagtttatgtttgtaattttagtattgggaggttaaggtaggtagattatttgaggttaggagtttaagagtaggttggttaatatggtgaaattttatttttattaaaaatataaaaaattagttgggtgtggtggtatgtatttgtaattttagttatttagaaggttgaggtagaatagtttgaatttgggaggcggaggttgtagtgagttgagatcgtattattgtattttagtttgggtaataagagtaaaattttatttttaaaaaaaaaaaaaaaaaaaagagtgattttcgggattgttttttatacgttggtttttatatgttagtagattatttggaaataaagggtttgtaagttgagaaatttttttgtttatttttttatagtatttaagagaaatttttattgtatataggtattaagtattttatttttatttttttttttttataatattattattattgtatatataatataatgtttaaggtgtagtaattattgattaagtatttgttggataaatgaattaataagatatgtatattatttattaaaaagtaaaaaaggaaggggttttgtaggtaaataatggtaagggtgattttggggttaagagtgtgtatgttttatttttttaagtttttttaatttgttgttgatttttggagaaattgttgttttttagtttttttttttttaaaatagggtgaggagatgataatttttaagtgttaagttattttttggtatggttggtttagttggtatggttggtttaagtggtatggtgttaaaaaattaaaaggaatagatttgatttttttaagaatttattaaatttatattttattatttattttatatatatttaaattttggtaagttgttgtgaaaatggatgttattttgaaaggtaagattagttaagggtatggggtagtttggtatagttttttttttattattagaaaaataattaatttggtcgtgtgtcgtggtttatatttgtaattttagaattttgggaggttgaggtgggtggattatttgaggtaaggagttcgaggttagtttagttaatatggtgaaattttgtttttattaaaaatataaaaaattagtcgggcgtggtggtaggcgtttgtaatttaagttatttaggaggttgaggtaagagaatcgtttgaatttaggaggcggaggttgtagtgagtcgagattatgttattgtattttagtttgggtaataagagtaaaaaattttgttttaaaaaaaaagaaaagaaaagaaaagaaaagaaaaataattaatttaagttagtttataagtagaacgtttaagaaaggatagtatatatatagataatacgaaagagtttatgttttgaggtttgagtgtatagttaaaggaaattttagttatttttatttatttgaaaatttaataatttgtttggaaaagtgaatagttttggttttttgtttattaaaaatgtaaaagattttatggagttttttattttagaaattttattatttttttagaagggatttagagggtatttaatggtatgtgaggtattgagaatttaattatttttgaaataaggttaaaatttttttttgttaaggttggggaagggtttgaggaggtaagtagatgagaatagtagtggtttttttttttttttttttattaagttgtggatataaagggttatgagtaaattagaatataattatgttaattcgaatttggttagtgaggaagtattttagttttttttggagggagggtatttattgagtttttaggttagtaatttttagtttttttttttttttagtgataaaatttttgggagaaatgggttttaataatggtttgggaaattatttttttgataaagtagtttagaaatgagtatttgtggataggggagggaagatatgtaaagagaattattttttttgcggggggggtagggttttattttgttatttaggttggagtatagtggtatagttatggtttattgtagttttaattttttaggtttaagtgattttttattttaattttttaagtagttggaattataggtatgcgttattatgtttatttaatgtttgtatttttgtagggatagggtttttttatgttgtttaggttggttttgaatttttggatttaagtaattttttcgtattggttttttaaagtgttgggattataggcgtgagttattatatttggtttatgaaaattaaaatgatttaagtattaatttttttttttttaattattttttttattatagaatttgtttattatttatttttaatttggtagtaatttatagaggtaaagaaaagagaagaaatataagagtaaaagttaaatttagaagtttagagaattgttgagttatgaaaaattagtgggacgagttaggttttttagaaattataaagtggtattttatttaattttttattttaatttttaaattaaagattggttatataaggaatgaatagagaaaataaatagggatttttaaaaataaaattattaagtatgggtaaaataatgtataaattttataaattgttagaggtaattttatttggtttttgatatagttattatttttttttagtttagtttttaaaaggattagggtttttagaggagtaggtaataatgggaaagtatttttaaatgagttttttgaattgttttttagtttttaagaaaatttgatatatttttatttaatgagttttttaagtttaatatattatttttagggttgttttatgaggatatagatttttttatgtttttttgaagaaaaggaatagtagtttgttttatttttgtttttgttttttttttttttttttttttgatatagggttttgtaggttggagtgtaatggtatgaatgtggtttattgtagttttgatatttttggtttaagtaatttttttattttagttggagtagttgggattttaggtatgtgtttggttaatttttgtatttttgtagagatagggttttattatgttgtttaggttggttttgaatttttggatttaggcgatttatttgtttcggttttttaaagtgttgggattatatgtatgagttatcgtgtttagtttatttttgttttttttaattgtatttgtaaattatattgataggttttttagtagaaaattttttaaatggttaatatgtttatattagttttttttatattagtgggtatatattttaagagaaatgaagattatagattagtttatagaaggaaattaaatgtttttataggtaagaaagatatgtaaattaattttttatttgagaatagtaaaaataaagataaaagttaaatttaatttaattggatttttttatttttttgtttatttttttttttttttttttttttttttgagatagagtttttttttgttgtttagggtggagtgtagtggtgtgattttagtttattataatttttgttttttgggtttaagtgatttttttgttttagttttttaagattatatgtatgtgttattatgttcggttaatttttgtatttttagtagagacggggttttattatgttggttaagttggtttttaatttttgatttcgtgatttatttattttggttttttaaagtgttgggattataggcgtgagttattgtgttcggttttttgtttatttttttttttaaacgattagtaattagtaaaaatggatgaattgatttgaatttcgtttttttttggttatggtagaaatgtttatatataattagttttaaagaatattagtagtggatattatgggtgtgtgtagatggttttgaaataggtagtaaaagtaaagatataattattggtttttaaattatcgagttatttgttttagtttaaaatttttaagttaattttagatttttatttaaaatatgaaaatgttttagagtgttttataaaaattttatattttaggaggtttttattattatttattaataattgtttgaatttgttgtttagttttttttaaataggtttttattttatatttatattattatagtgttggcgttagttttaggggaagatggaaaaaatagttttgggatattaggtgcgggtaattggaaattttgaaaggtttaaagttgtgtattaatttttattttattgagattatttattttttttttgataggggtgattttaatatgttatgtttttgtgatatgggtagtgatagtgtttgaagtgtggtggaaaggggattaggttaatagttaagggagttgggtttttattttagttttgttattttgagagtttggttaagttatagtatttttttttggtttgtttttttattagtaaaatgtatggttaaggttagaaaatttttaaggattttgtttgatataatgatgattttaagtgaaggaaaaaagaagtgaaagagtttatttaattttttttttatttaaaaataattaaggatatatgatattttattaatatatattgttaaattaaatttttgtttgtttgttttttgagacggagttttattttgttgtttaggttggagtgtagtggcgttatttcggtttatcgtatttttcgttgtttgggtttaagcgatttttttgttttagttttttaagtagttgggattataggcgttcgttattacgttttattaatttttgtatttttagtaaagatagcgttttgttatgtttgttaagttggttttgaatttttgattttaggtgattttgttcgtttgggttttttaaagtgttgagattataggcgtgagttatcgcgtttagttagttaaattaaatttttaaagagttatagatgtattatttgattcgaaagataatatgatttgttagtgttaggtaatttaggattatcgattattttttttaaggttttttttattttatagttgttatgtttgttaaaggatagagtttttaggttttttgaaaatatttgggaaattgagttatttggatattttttaattatgtattttttataagttataaagatttattatataaagttttttatttgtaatggtgtttttaataatagaataagttatattatttatattttatttagttttaattatggttatttgttggtttgtatgtgaagtaagaatttaagtgatagaaaagagttaatacgtttagtggggttgaaataatatacgagtgggaatattagtttttaaattaagttgggttagtggtggaggggtaatggattaattgtagaggtaggttacgatatcgtttttttttttgtttagaacgtttttttcgatagttgtagtatgtaaaaggtaaggcgttttagggattaaatttattcgtaaagggggatattgaggtttaaaaagaaagtaatttgtttagggtgacgtaataaggttttattttcgtttcgaagttaacggcgatgatatttaggcgagggattacggaattattatagtttgggttcgcgggaggggacgggacgttacgattcgtggggcggtagtcgtcgttttaagattttcgtcgtcgttaggggtgttattttttttcgaggagttttttattttgttatatagtattgtagcgttgtttttcgtaagataaaattgtttcgtaattttttcgggtcgcgggaggggttttagggtttttagaatattatttttattattattttagagggtgaattgcggtgagaatcgaaatttgttatatttttattttcgtggtttttttttaggattgtaagtttgaatgtgggtatttcgagggtttaattgtttttttttatttgaggtatttattagggatagtaattagtagcggcgcgatagtaatagggtagagtgggacgggggcggggttaagtatttaagggagagttcgattcgtttgtttcgtttatacgttataacggttagtaagtttcgttttcgcgcggcgtttgttgggatttgtagtgtttaggtgatcgggttttaggagcggttttttgtttttgatggtttttttaagttttgagtagtaattttatcgaaataaatttattttattttttggaagaagttgtttatttttttttttttttttttatatttttattttttttttttttttttgtcgtttaggttagagtgttatggtgcgaatacggtttattgtagtttcgatttttcgggtttaggtgatttttttattttagttttttgagtagttgggataattatggtgtttatacggcgttcgttattacgttaggttaatttttgtatttttagtagagatggggttttgttatgttgtttaggttggttttgaatttttgggtttaagaggtttagttgtttcggttttttaaagtgttgggattatagatttgagttatcgcgtttgggttatatttttatgttttttttttttgaatgagaaagttttatatatttgaagggttattaagaggttatttttattttttttttgggtttatttaatattattttacgaagagtttttattttttttgagataaggttttattttgttgtttaggttggtgtgtagcggggcgatttcggtttagtgtaatttttgttttttgagtttaagttattttcgtgttttagtttttttagtagttgggattataggtattcgttattatgttcggtttatttttttgtatttttagtagagacggggttttattatgttggttaggttggttttgaatttcgttttaaaaagaaaaaagagaataaatttatggttaggtatagtagtttacgtttgtaattttaatattttgggtggtcgaggtgggagattttttgagtttagaaattttagattattttggataagatagggagattttgtttttataaaaaataaaaaaattagtcgggtgtggcggtgggtttttgtagttttagttatttaggaggttgaggtggtaggattatttgagtttgggaggtggaggttgttataagttatgattatattattgtattttagtttgggagatagagcgagattttgttttaaaaaaaaaaaaaaaaaaaaaaaaaaaaagaataaatttagtaagaaaagaattttgttaagttaatttaaagaaaattttttatttttaatatttaataattttggtttgtttttaataagagttttgttaagttggtttaataagaatttttttttagtaattttttatgtagtgattttttattttgtttgttggttataaattttatttgttattattgtatttagagtgtagtataattttttttttggttttgaataaatttttttttgttattttaataagttttagaatatttttttttttaatatttagaagatgttaaatgttgtatatgttgtttatgaaagattaaatttggaagtgtttttttttttattgtttaaatgtggaaagaaatttttttgtgttattttaggtaggggaatgagtattttttttttttttttttttttgtcgagatagagttttgttttgtcgtttaggttggagtgtagtggtatgatttgggtttattgtaatttttatttttcgggtttaaatgatttttttgttttagttttttgagtagttgggattataggcgttcgttattacgttcggttaatttttgtatttttagtaaagacggggttttattatattggttaggttggttttgaatttttgattttgtgatttattagttttagttttttaaagtgttgggattataggtatgagttattatatttagcgggaatgagtatttttaatttgtttttttataagattggtggtatttaattgagatgaatagatggtgggaaatgatgagtaagttaggaagtgggttattcgtttaaagtttaaattattttttgagttattaaaataatattttttattttaaattcggtttgtagggataagtgtttttagtattttggatatattttttttaattttatttattagattttttaaaagtattgagaatgaaaattatttgtatttatatagtttattgtttatattaatatgataattattttagtaaattaaaaatgaaggttggtcgggtatggcggtttacgtttgtaattttagtattttgggaggtcgaggcgggcggattatgaggttaggagtttgagattagtttggttaatatggtgaaatttaatttttattaaaaatgtaaaagttagttgggtatggtggtaggcgtttataattttagttatttgggagggtgaggtaagagaatcgtttgaatttaggaggtagaggttgtagtgaattaagattgcggaggttgtagtgaatcgagattgtatttttgtattttagtttgtagttttatttatttaggaggatgaggtaggaggattatttgagtttaggagtttgagtttgtaatgagtagtgattgtatattgtattcgagttttggtaatagagcgagattttgttttagaaagaaaaaaataaaaaaaaattaaatttgtttttataaaattaataaaaggttatagatttagaattatgagaggggtttgaattttgttaacgtgttggtatagttaaatgattattagttattattttggaggttataagatttataatttttttaattatttttataaataatattattattgtagaatttaagattggttttttgatagatttttttagattttggtatttttgataattagatggttttattagaatttaggatttttaattggttttgtgattttttatttagaaatagatttagtatataagaaatattttttatatttttgtgattgtatttttaattaattagtagtatttattttttagttttttgtttgttaaattatttttaaaaaatttagtttttaaatttttagaaagattgatttgaataataataaaattttgtttttttatttagttggttttatgggtattaaattttttttttattataatttttcgttttgataaattggttttttttgagtagtggataagaattcgttgggtgtttatataatcgttggttttaaaatattttgttgtgtttattagttttaaatgattgtattatgatttttattttattttaattaatttttaattcgtattgaaagagtttatatttaaattaaattttaaagatttagtatatattattatgtgttttttattttgagtttttataattttgttaaagtagtgttttttttattgtagtaaggataaattagattttgttttattaataggttattttgttgatatttttagtatttaaatttaatagtataaaataaaatagttagtttgatttttttttttttttttttttttttgttttttttttttttacggagtttttttttgttgtttaggttggagtgtagtggtatgattttagtttattgtattttttgttttttgggtttaagtaatttttttgttttagttttttaagtaattgggattataggtgtttattattacgttaggttaatttttgtatttttagtagagatagggttttattatgttggttaggttggttttgaatttttgattttaggtgattcgttcgttttggtattttaaagtgttggttggtattataggtatgagttattgtatttgtttttttttttttgtttgtttgttttttttttttttaagtagagatggggttttattgtgttgtttaggttggtttcgaatttttgggtttaagtgatttttttgttttagttttttaaagtgttgggattataggtataaattattatgtttaggttagtttgatttatgtatttatgtagttatttatttatttattgagatggagttttgttttgttatttaggttggagtgtagtggtgtgattttagttaattgtaatttttattttttgggtttaagtgatttttttgttttagttttttaagtagttgggattataggtgtatgttattatgattagataatttttgtatttttggtagagacggagttttattatgttggttaggttggttttaaatttttgattttaagtaatttgtttatttcgggtcgggtgcggtggtttacgtttgtaattttagtattttgggaggtcgaggcgggcggattacgaggttaggagattgagattattttggttaatacggtgaaatttcgtttttattaaaagtataaaaaattagtcgggcgtagtggtgggcgtttgtagttttagttattcgggaggttgaggtaggaaaatggcgtgaattcgggaggcggagtttgtagtgagttgagatttcgttattgtattttagtttgggtgatggagcgagattttattttaaaattaaaaataaataaataaataaataaataaaattaatttgtatatttcggttttttaaagtgttgggattataggcgtgagttattgagttaggttttaatttgatttatttttaatagaaatgtcgtgggagggttgtagttgtaattttttataattggatatggaaggaataggaatttatatttagatttatagagaaaattttttatttttatttttaattgttaagttttagggtaaaaaaaaaaaaaaaaaaaaaaaaaagattgaggcggtatgtggttattttgtgtatgatatagtagattattttattttatttttttaagggaagtatttttattattcgtattttatagatgagaaaagtaaggtttagagatataaaattatttttttatgtttatatagttaataagtgttattaga

SEQ ID NO: 117 - DNA, 15832 bp, Artificial Sequence
  chemically treated genomic DNA (Homo sapiens)
  unsure (791, 2400, 3281, 4994, 5001..5002, 5006, 5012, 5016, 5024)
  unsure (5221, 5244, 6508, 12917, 12968, 12987..12988, 13055)
gagtgtaagtatgggtagtataataattagaagatgttttttgtttgtagagaggagtggtattatagtttttattagagatgagaattgttaaagtttgagagatttttagagtattaatagataggaattaaagtaatattagaagattttgaagatgtttattgggtttatttttattggaaatatttgggtgtttgaaagatatttgaaattttttttttgttattgagttattggtattttattatagatgaaaggggaaaaggtaaggtttggggtagataaagtaaatattggtttttttttagaaatgttttggattttataaaagattggaataaattagtattgtttataattaaatgtttattttgtgttagatagtgattaaattttattttttgtgtttttttcgatttttataaaagtatttagagtttaggtatggtggtatgtattcgtggttttagttattagggaggttgaagtgggaggattgtttgagtttaggagttttgggttgtagtgtattaaatcgattaggtgtttgtattaagtttggtattaatatagtgattttttaggagtgagggattattaggttgtttaagtaggagtgaattagagtaggttagaatttttattttgagtattagtaggatcgtatttgtgaatagttattgtatttttgtttggttaatatagtaagatttttgttttttttaaaattttaattttttttttaatttaaatttttatatatttttatttttttttttttttttttntgagatagagttttttattatcgtttacgttggagtttagtggcgcgattttagtttattgtaattttcgtttttcgggtttaagcgatttttttgttttagtttttcgagtagttggaaatataggtgtttgttattacgtttagttaattttttgtatttttagtagagatagtattttattatgttggttaggttggtttcgaatttttgattttgtgattcgtttattttagttttttaaagtgttgggattataggcgtgagttattacgttttgattttttatttttaaaatagagatagggttttattgtgttatttaggttgggtttcgtttttttgggtttaagcgatttgtttgtttgggttttttgaagtgttgggattataggtgtgaattattatttttggttaatttaggttttttttaaattatattatgttgttttttgggtggaaattgaagtagaagtagtagtattaaagtgttaggaaaagggataatcgtattataggattggtttttttagttattaatagattttttttaatttttaagtgtattcggtttgtgtaatagttttggtatattttttgatattggtatgttaattttttttgggatggtaaattatatggtttgtgggttttggggaaagttattgtgtgaggaatttttttttttgattttttttttttttttgagataagagttttgtttttattgtttaggttggtgtgtaatggcgtgattttggtttattgtaatttttttttttcgggtttaaacgatttttttgttttagttttttgagtagatgggattataggcgttcgttattacgtttttttaaattttgtatttttattagagatggggttttattgtgttggttaggatggtttcgattttttgattttaggtgatttatttgtttttgttttttaaagtgttgggattagagatttgagttatcgtgttcggtcgaggaattttttttttgttgagagaagggatataaaggagaaatttttttatattagtttaaatgatttagaaataaattttgttttaatattatgttttttttgtagaaagttgtttaggttaagagtaaatagtttagattttttcgtttttttgttttttatttgagttaggttattatggtatgtgtttaaattatttttatttaaataaattttttttttttttttttttttttgagatggagttttatttttgttgtttaggttggagtgtaatagttcgaatttagtttattataattttttgttgttcgggtttaagtgatttttttaatatagtttttgagtagtaggagtttttgtaggtttttatgaacgttgttgtcggttataggtataatatttgaatcgtgggattagagattgtagtgagttaagattgcgttattgttttttagtttgggtaatagagtgagattttgttttaaaaaaaaaaaaaaaattttttatagagatggatttttgttttgttgtttaggatgattttgaaattttggttttaagtaatttttttgttttgggtttttaagtattgggattataggcgtgagttttngtattaggttttgtgtttaattttttgaggaattattaaattatttttcgtagtggttgtattattttatattattaataacgtttgagggttttgattttttttttttatatttttattaatatatggtatttttagagttttttggttttgtattttttttatagttattttagtggtggttgtaaattatggtgttttatggttttgatttgtatttttttaatgattaatgattttttttttttttgagacggagtttcgttgtgttttttaggttggagtgtagtggtgtgattttagtttattataagttttgtttttcggatttacgttatttttttgttttagttttttaagtagttgggattataggcgttcgttattatgttcggttaatttttttgtatttttagtagagatggggttttatcgtgttagttaggatggtttcgattttttgatttcgtgatttattcgtttcggttttttaaagtgatgggattataggtgtgagttatcgcgttcggttttttaatgattaatgatttgcgtatttttttatatgtttgtttatttgtatatttttttttttgagatcgagttttgtttttgttgtttaggttggagtgtaatggtgtaatttcggtttatcgtaattttcgttttttaggtttaagtaattattttgttttagtttttagagtagttaggattataggtatgtattattatgtttggttattatttgtatttttagtagagatgggggttttattatgttggttaggttggtttcgaatttttgattttaggtgatttatttgttttagttttttaaagttttaggattataggtgtgagttattgtatttggtcgntttttttttttttttttttttttgagatagggttttgttttgttatttaggttttcgagtgcggtggtataattatggtttattgtagtcgtgattttttaggtttaagtgatttttttattttagttttttgagtagttgggattatagatgtgtgttattatgtttagttaatttttgtatttttagtggagatgggtttttatcgtgttttttaggttgattttaaatttttgggtttaagtaatttttttattttggttttttaaagtgtttttttttttttatgttttttttattttagtttgtttttttatattgatatggtacggtatgtttgtgtgcgtgtatatagatataatgtttgatcgtagagattaggaagattttgttaaatttatttggaattttttgttgacggtagggaaaatagatgtaaggaaggtgggtgttagggaatagggaggtagtatgaggagagggattgatagaagaagataaagatacgggtgagggtttgttgagaattttaagttatttaagtagaaagggatttttaaggttaatttgtttaattttttggttttataaatgaggaaatagaggtttagagaagtgagatggtttgtttaatattatattgttgttttgtggtagagttgtaattagaatttaggttaaaagaaaagggattggagggtagtgtatatttaaggttttaaagagatattgtttagaaggagaaagagagattgatattttatagaaagaattgatgaatgtagatttttagtagaggtttggagtatgaagatataggggtaggaggggaaggtgtttagaagatattatagttaggtagagttaggttttggattttattttgttattatttattagttttagttttagtttttgatgtatttttagaatttttgtgaaaattagttttttttttttttttttttttgagatatagtttaattttgttagttaggttggagtgtagtggcgcgatttcggttttttgtagtttttattttttgggtttaagtgatttttttgttttagtttttcgagtagttgggattatagatatgtgttattttattacgtttagttaatttttgtatttttagtagagacggggtttttatgttggttaggttggtttcgaatttttgattttaggtgatttatttgttttggttttttaaagtgttgggattataggtttgagttatcgcgttcgatgaaaattaattttataaattaagtttgtaatattagtatagtttttaataagtgtttattaagtttttattaaggttatattattttagaagaggaaagatttttgattgtatgggttaaggtatggtttaaatgattttgtgaggatataggatagaggtttagtgtttttagagtttattttttttgtgtttttgttgtttgtaattgataaattttttatttggtttaggtaggggagtttagggttaggataggaggagagggtagagttgttattaattattaggtttgggttatattttggagaggaggaggggttgtttgtttgtttttttttataatttgtttttggggatttttaagtatatattgttattattttggaaagaaaaggttgagaacgtaaaattgaggatagaggaggaaagtagggtgatttttgatgttgttttaganaatggannntanggagtngtanaatagaanattagaagatttgattttgtttttagttaggaaaatagtttgggggagtaaaaagtattagggaaaagagtgggtattttgtttggaaaaaaggtaaagattttttgtgttattaaaggaattgattgtgtttatagttggcgagaaggagattataatataggaaaagatttgtcgtttgttggattattagtttnggtgagattatcgatatttcgtntaaaaggaatattcgtgtttttttattttaaaaaaaaaaaaattgtataatttagggatttttttttttttttttttttttgagatggtattttattttgttatttaggtgggagtgtagtggtgtaattacggtttattgtagttttaattttttgggtttaagggatttttttattttagttttttaagtagttaggattataggtgtaagttattatgtttgagtaatttttaaattttttgtggagataggagttttgttatgttgtttaggttggtttttgaattgttgggtttaagtgatttgtttattttagttttttaaagtgttgagattataggcgtgagttattgcgtttagtttaattaaattattattattgtttttttttgagatagagttttagtttgttgtttagattggaatgtagtggtgtagttttggtttattataatcgtagttttttagatttaagtagtttttatgttttagttttttgcgtagttaggattataggtgtgtattattacgtatagttaatttttgtatttttagtagagacggagttttattatgttgtttggattagttttaaatttttggttttaagtgattcgtttgtttcgtttttttaaagtgttgggattataggtttgagttatcgtgttcggttacgttattggaagttttatgtagaaatatgtaaattaattatgtggtttatatgttatatttttttaagtttggttagtataagtgagtttttttaagatgaattaattgattaaaattgatatgggtatttaagttaaagtttgaatgtttttttttttttttttttttgagatagggtttttatcgtttaggttggagtgtagtgatgcgatttcggtttattgtaattttaatcgttttggttttagggatttttttattttagtttttttagtagttaggattataggtatatattattttatttggttaatttttgtattgtttggtagagatggggttttattatgttggttaggttggttttaaagttttgattttaggtgattcgttcgttttagttttttaaagtgttgggattataggtataagttagcgtgtttagttttaatgtttttaggaaaaaaaagttagtaatgtttttatttttgatagtttaattaatttaggtgtggaaggagttttattttatatgtttaggagagatagtgagaggaatttttttgtttggtttttttattttatntagtaagtagatttagaaaagtaatttaaattgtttagggttatataatttaattagataaggttttagatattaatttttaatttagggttgtaatggtttttgttttggtaattatagattggttttattttagttattgtataataaaaaatagtatagggttattatagtagagttggggtaattatagttgttgatttggagatgtgggcgaattttttttataaaattaggttttggggagataatagaagggtgatattttttttttgagattgagttttgtttttgttgtttaggttcgagtgtaaaggcgtaatttcggtttattgtaattatcgttttttgggtttaagcgatttttttgttttagtttttcgagtagttgggattataggtatgggttattacgttaggttaattttgtatttttagtagagacggggtttttttatgttagttaggttggttttaaatttttaattttaggtgattgttcgttttggttttttaaagtgttacgattataggtataagttatagtttcggtattttttttttttttttttttttttataagataaaaaaatttttgttgtttaggttggagtgtagttttaattttttgggtttaagtgatttttgtattttagtttttaagtagttggattataggtgtgtgttattatagttggttagtttttaaattttttgttgagatagggttttattatgttttttaggttggttttaaatttttggttttaagtaatttttttgttttggttttttaaagtgttaggattataggtataagttattatatttagagatggtatttaatttaataatagtttggttttgtttttgaggtgtaggaggtgtttttttaatatatgattatgatgaaaattaagattataaaaaagaagatttttggggttatgtagttgtaatttttatttagtagtttgaggtgttacgtggatgaatttttttgattgttatttaaagatttatttttattttttaattattttattaattttttttaggattatattatatatagtaatttgtataaagaataacgttgttagggggtagaattgaatgttagttatgtatttagaggaatttaattttttttatttttttatagagttgtgaggggatgattttttttaggaagagggatattttttttatttttttttttttttttttgagagaagattttattttgtcgtttaggttggagtgtagtggtaagattttagtttattgtaatttttgttttttgagtttaagtgatttttttgttttagatttttgagtagttgggattataggcgtacgttattacgtttagttaagttttgtatttttagtagagatggggttttattatgttggttaggttggttttaaatttttgattttaggtgatttattcgtttaggttttttaaagtgttgggattatagacgtaagttattgtgttcggttgtttttttttattttgataaggtagaaggttaagtatgtgggaatagatataagtaaattggtggattttggtattggaaaaaatgaggtagttttatttaaatgtatttattttattaatgaaatatgaagtaagattatttgttgagagtgaattggaggtggtattggagatgttagaagagagaaggtgtgaaataattattatgtagggtagaaaagagaatttattagggaaatatagaattatttgggagtgttgcgttttaggggtatttttttttttttgagatagagttttgttgttatttaggttagagtgtagtggcgcgttttagtttattgtattttttgttttcgggtttaagttatttttttgttttagttttttaaatagttgggattacgggtatgcgttattacgtttagttaatttttgtatttttagtagagacggggttttattatgttggttaggttggtttcgaatttttgattttaagtgatttgttcgtttcggttttttaaagtgttaggattataggtacgagttatcgtatttattttaggggtataaatttaaagtgatgttagttagttagatatagagatttttttttttaatatttagttatttaggtatatatatggagaagttgaattgttggatttaattggaatttgatttttttttaggaaagttttatggagggtaagagggataaggaagttaataatgtttgtaagtttatggttttggatgtgaaggggagtgagtggattatttaaaaaataaaagatcgggtatagtgatagatatcggaatagttacgatagtagtttttaatagcggtatagtagtttattagggcgtggtggtacgcgtttatagttttaattacgcgggaggttgaggtaagagaatagtttgaattcgggaggtggagattgtagtgagttaagatcgcgttacgtgcgtattttagtttgggtgatagagtaaggttcggttttaaaaaaaaaaaaaaaaaaaaagaatttttaaggtttaaatgggtagagaaaaggataatagaataaggagtttagaaaaaatattttataatttatgttaattttattaggtattttagaattttgatggaatattgattatttgataaatttatataatagggattaataggaaatcgaagataaaatagttttttgaaggaatgtggtagggaatcggtaatggagagttaaatttgggaaattattaggaggagtttgtaacgataaaatatttgtattttttttttataatatggggcgagtttggtggtttggtaaattaaaattagggtattatttataatgttaaaaataaggggtaatttgaagggttttaatttagtacgtttataggtttgtgtattttaaggagtttatgtgttgtttttaattttttatcgattttatgtttttttttcggtagggttttttattttaaattaaggttttagtttttatattaggttatatatttattttaaaggttagtagaacgtttagtttttaagaattattcggaatttttttttttcgttttttattcgggttgaattttgattttcggtttttgtggatattatagtatttttgttgtttttttagtttttattaaaattagcgtttttattttgtttcgtagttggtgtcgacgtggagtcgtaaaagaaacgtcgtcgttgattggttatacgtttttattaggtttcgtttaggataaggattattgggtaaggtttgttttattggttaattattgtattagtttgtttatcggaagtaaagtgtttaattagaaggtttaggtgtttgattgttagtttgaatatttaataaaacgttaaaattttacgatttattggggcgggagggttagtggggcggggttgtttttatggggaatagaagaagcgattgttaatttttaattggtagggtcgaggatacgtgatattgtcggattgatttagcgatttttaaatcgtattttttttagggggcgttgtgtttttttagtttttaatattggcgttttttaatcggaattttgttttaatttttatttttagcgttcgtattaggtttatgatttttgtggttagttttttttttatgttcgtttaggttattttagtatttttatagaaagtttgtataattatagagtagagttaagaaaggtttaatatgttaattatataaattaaggttgttaggagttgatagtcgtaataataatttttttaaggtggagttttaggttttgttgggtttgaggaatatgagaagttagtttgtaaaggttaatttgagtttaacgtgaaatcggttttggagatggggtttgcgggataaacggggaaagggatgggattagaataagagaggggttatagggagtaaattttggggttttttaatagaaataagtcgttgtgtttgggcgcggtggtttaagtttgtaattttagtattttgggaggtcgaggcgagcggattatttgaggtcgggagtttgaaattaatttgattaatatggagaaatttcgtttttattaaaaaaaaaaaatataggtcgagcgtgatggtttatatttgtaattttagtattttgggaggtcgaggcgggcggattacgagattaggagattaagattattttgattaatatagtgaaatttcgtttttattaaaaatataaaaaattagtcgggcgtgggtggcgggcgtttgtagtttttgttattttggaggttgaggtaggataatggcgtgaatttaggaggcggagtttgtagtgagttgagatcgcgttattgtattttaatttgggtgatagagcgagatttcgttttaaaaaatatatatatatataaaattagtcgggcgtggtggaatatgtttgtaattttagttattcgggaggttgaattaggagatttatttgaatttgggaggcggaggttgaggtgaggcgagatttcgttattgtattttagtttgggtaataagagcgaaattttattttaaaaaaaaaagaaaagaaaagaaaaggagaagagaagagaaaagaaaaggagaaagaaagaaaagaaagaaagaaaggaaggaaggaaggaaggaaggaaagaaagaaagaaagaaagaaagaaagaaagaaagaaagaaagagaaggaaagaaaggagaggaaagaaatgaggcgttgtaaaatgagaaaagagaagtttattgaatgtaagaattttagaatagggaatgattttgaagaaggggtttttttaaaggttcgtgtagtaaatatttattagagttgcgggtttattatattgattaggttggtttttaacgttcgattttaggtgatttatttattttagtttttaaagtgtagggattataggtgtgagttattaattaagttcggttaatttaatttttttgagttttattttttttttgagttttattgaaaaatggagataataatgagaatgtttatttagcgaagttgttaggaatatataatgggattaatataaaaattagtttgttatttattagatgaaagtttagatatttggaggttagagtgatttaagggtttgaggaatttcgaatgttttatttggaggttagattttggtagagagatgtttgggataaattgaagttagtaaagagtttgattttgggggagagtaagagttaggttgtattagtgttggcggggaggggtggtggttagatttttaggaattagtttgtaggtcgtggtttttttattttagtattattgggcggggttagttttagttacgttatgggtatagtgttaggtttatgggttttagttattttttaggaattttagaattttcgttttattttatattgttgtaattttttaaagtgggtggagttgtttaggaagttttattttttgtttttttttagaggatggaaggttagatttttggttatttattaatttttttttataggtattttttttattttagatttttatttttgtttttgttgtttttttttatttggaatgttttttttggttttttttattaatttgaggtagtgtggagtagacgagagatttgggtttgagttttagtttagtatttagtagcgtggatttgggtaaattatttaatttttttgaattttagtttttttttggtaatgagtgagaatagaggttttattataggttgtgtaagggattagatgaagtaatgtatatatagtgtttatataggaaatatattaatgttggttttttttttataatttattttttaaggagagtttattattattttaggaatgtaatattttttttggttatttttatatatatatatagtttttttttttttttttttttttttttttttttttttttaaatttttttgagatagagtattatttttgttagttaggttggagtgtagtggcgtaatttcggtttattgtaattttcgtttttcgggtttaagtaattttttgttttagttatttgagtagttgggattataggtatttattattatatttggttaattttttgtatttttagtagagatagggttttatattttggttaggatggttttgaatttttgattttgtgatttatttgttttagttttttaaattgttgggattataggagtaagttatcgtgttcggttaatttttgtagagatagggttttattatgttggttaggttggttttaaatttttgattttaggtgattttttcgttttagttttttaaagtgttgggattataggtgtgagttattatgttaggtattttntagttttaaatggttgaatttgatgattgtgaaatgggtaggataaagatnaattaaatttttagttttnntaggaatgtaaagttttaggattttttttaaaatttagaaagtttgtttgttggaaaattttttttntttgagacggagttttattttgtcgtttaagttggagtgtagtggtttattgtaattttcgtttttcgggtttacgttatttttttgttttagttttttgagtagttgggattataggcgcgtgatattatgatcggttaatttttgtatttttggtagagacgggttttattatgttggttaggttggttttaaatttttgatttcgtgattcgttcgtttcggttttttaaagtgttggattataggcgtgagttatcgcgttcggttttgttggaggattttttatttaggggttatatagtttttaattttttaattattatggaagtgaaagaattatagaaatgagggataaagtagtattgttgggaagagagatgaattgaataaggagaaattagattatattttagatttgaggtttgagagtattattagaatattttgtttttttagtttggtaatttaggagtttttatttaaataatatttagtaaaggaaaaaaattaaaaggggttagatttatttttgatgagttttgggttacgatttgtattatgatttatttttttatttttttttatatttttttgtttttgtttttgaaaataaaaagttagtttttgagagattgaattgatagattttgtgttattttttagtttatttatgtttttaaattaatttcgaggtagaattgttttatttttttttggttttagtttttttttaaaattatataatagaaaaggagttgtagaaaattagttgatcgagttatttagggtaattggttatggatgggatatttgtattgagagtgagaaaataggtcgggcgtagtggtttatatttgtaattttagtattttgggaggttaaggtatgtggattataaggttaggagttcgaggttagtttggttaatatggcgaaatttcgtttttattaaaaatataaaaattagttaggtatggtggtgggggtttgtaattttaattattcgggaggcggaggaaggagaatcgtttgaatttggaaggtaaaggttgcggtgagttaagattatgttattgtattttagtttgggtaataagagtaagattttgttttaaaaaaaaaaaaaaaaaaaaaaaggagtgtgaaaataaaaagttaaataaaaaagtaggttttatttgtagtatatataatttagattatataataggaaggattttttgaagagatgggtgtggttaaatattagaagaggtgatataggttagggaatgtaaggttaggagagatttttttaataatttgatgtaaggaaatttattttgtttaaaaataggagggatagaatgtgagagggtttttgttagtataagtattttataagtgtatggatttattttttgaatttatttttattagttgttttttgggtattttgttttttttttttttaattattttagtataagtgggtatataggtattgattttttatttttgttttatttgatttgtttttttagtttttttttttataatttgtttttttgttaatatttaaattttaattaagttatgttaatggagtaaagtaagaaatagtagtaagtatttagataaaaaagattttaaatttgttattaggtttcggtaaaaatttggataattgtatttattttttgttttttaggtagatttggttttttagggtttggttttttttatatggaggtttttttttttttttttgattatgtgatagtttttttagatttttgatataatttatattttgttagggattaatttttttttattattgtgaagaagagggaaaaaatatatataaatacgtcggaaatttataataaggtttttttggagggtaagatatggggagagttagaagtagcgttaattgttttttgggggttttagtttaagtcgaggtttgtttttagtaattaattattaaaataagttggttagagtaatagtatagtttattttgattatttaatttgaagtgttaataaattaaattttaattaattaaattaggtgtgtaataatttagatggatatttcgatattaatataattataataaaaatttttattgttgttagggattttatcgggggtagtgttggtattgttcgcgttttagttgagaaatatatttttatagcgtaggaatgaggagattgttttttttaataaaatggagggggttaggtattagtaaggacgtagttgggagaggggtataggggattgttaggaacgagatgggagtgttttaggggtttaatgtaattgatatttttgtttagagtagggggaggggggtatttaggttaagtatttttattgttagggttaaaggaatttaataaaagttttattaagatgatttaggaagtaaaggttaaggagtaatattaatttttaaagttattgatatattttgtatagtttttttttttatatatatttatatttttgtgtattttggatggtttgattttttaatgaggtttagaagttttagtagttaatttagtggttatagttttggcgaggtgatagattataatataggaaaagattttttattttaagtgattgatgaatttagtatgagtgaggatggggaggaggcggttttttttttttttaggggaagttggagggagtttttttaaggaggtagtgtaaatttgttgattttagtaggtgtagttttaatatttttttttttttgatatagg

SEQ ID NO: 118 - DNA, 15832 bp, Artificial Sequence
  chemically treated genomic DNA (Homo sapiens)
  unsure (2778, 2845..2846, 2865, 2916, 9325, 10589, 10612, 10809, 10817)
  unsure (10821, 10827, 10830..10831, 10839, 12552, 13433, 15042)
tttgtgttaaaggaaaagaggtgttagagttatatttgttagggttagtaagtttgtattatttttttggaggggttttttttagttttttttgagggaaggagagatcgttttttttttatttttatttatgttggatttattaattatttaagatggaaagtttttttttgtgttgtgatttgttatttcgttaaaattatggttattgagttaattattagagtttttaagttttattaaaaaattaggttatttaaagtgtataaggatatgagtatgtatggaggaggaaattatgtagaatatgttaatgattttaaaggttgatgttgttttttggtttttgttttttgaattattttaatggggtttttgttaaatttttttggttttaatagtagaggtatttggtttaaatgtttttttttttttgttttgggtaaaggtattaattatattaagtttttaaagtatttttatttcgtttttggtagttttttgtgttttttttttagttgcgtttttgttggtgtttggttttttttattttgttaggagaagtaatttttttatttttgcgttgtggagatatattttttagttagggcgcgagtagtgttagtattgttttcggtgaggtttttggtagtaataaaaatttttattgtgattatgttggtgtcggggtgtttatttgggttattgtatatttagtttaattgattgaagtttaatttattgatattttaaattaaatgattagaataaattgtgttgttattttggttagtttgttttaatggttgattgttggaagtagatttcggtttgaattaaaatttttaaagagtaattgacgttgtttttaattttttttatgttttgttttttaagaagattttgttatagattttcgacgtatttatatatatttttttttttttttttatagtggtgggaaagagttggtttttggtaaggtataaattatattaaagatttaggggagttgttatatggttagaagaggaggagggggtttttatgtgaggaaaattagattttgagaagttaggtttgtttgggaggtagaggatgagtgtaattatttaggtttttgtcggagtttagtggtaggtttagggttttttttatttagatatttgttgttgttttttattttattttattgatatggtttgattagagtttggatgttgataagaaaataggttgtggaaagggaaattagaggagtaaattagatggagtagggataaagaattagtatttatgtatttatttgtgttggagtaattaggaagaggaaaggtagagtgtttaggggatagttgatgaagatggatttagagaatgagtttatgtatttgtaagatgtttgtgttggtaagggtttttttatattttgttttttttgtttttgggtagaataggtttttttatattagattattagggggattttttttggttttatattttttagtttgtgttattttttttggtgtttgattatatttatttttttaggaagttttttttgttgtgtaatttaagttatatatgttgtagatgaagtttgtttttttatttggttttttatttttatatttttttttttttttttttttttttttgagatagagttttgtttttgttgtttaggttagagtgtaatggtatgattttggtttatcgtaatttttgttttttaggtttaagcgattttttttttttcgtttttcgagtagttgggattataggtttttattattatgtttggttaatttttgtatttttagtagagacggggtttcgttatgttggttaagttggtttcgaatttttgattttgtgatttatatgttttggttttttaaagtgttgggattataggtgtgagttattgcgttcggtttatttttttatttttaatgtagatattttatttatagttaattgttttggatagttcggttaattaattttttgtaattttttttttgttgtgtggttttagagggagattaaaattagaggagaatagagtaattttgtttcggggttgatttgggggtataaatagattgaaagataatatagagtttgttaatttagttttttagagattagttttttgtttttaggagtaaaagtagggagatgtgggggggagtaaagggataaattatgatataaatcgtgatttaggatttattaggaatggatttagttttttttgattttttttttttgttgagtgttatttaagtgagggtttttggattattaaattgagaaggtagaatgttttaatggtgtttttaggttttaggtttggagtatagtttgatttttttttatttagtttatttttttttttagtagtattgttttgttttttatttttgtgatttttttatttttatgatagttgaagaattagggattatgtgatttttgggtaaaaaattttttagtaaggtcgggcgcggtggtttacgtttgtaatttagtattttgggaggtcgaggcgggcggattacgaggttaggagtttgagattagtttgattaatatggtgaaattcgtttttattaaaaatataaaaattagtcggttatggtgttacgcgtttgtaattttagttatttaggaggttgaggtaggagaatggcgtgaattcgggaggcggaggttgtagtgagttattgtattttagtttgggcgatagagtgagatttcgttttaaanaaaaaaaattttttaatagataggttttttgagttttgagaaaggttttgagattttgtatttttannaaagttaggggtttggttngtttttgttttgtttattttatagttattaaatttagttatttgaagttgnagggtgtttggtatggtggtttatatttgtaattttagtattttgggaggttgaggcgggaggattatttgaggttaggagtttgagattagtttggttaatatggtgaaattttgtttttataaaaattggtcgggtacggtggtttatttttgtaattttagtagtttgggaggttgaggtaggtggattataaggttaggggtttaagattattttggttaagatgtgaaattttgtttttattaaaaatataaaaaattagttaggtgtggtggtaggtgtttgtaattttagttatttaggtggttgaggtagagaattgtttgaattcggaaggcggaggttgtagtgagtcgagattgcgttattgtattttagtttggttgataagagtgatattttgttttaaaagaatttaaaaaaagagagagagagaaagaaagaaagaaaagaggattatgtgtatgtgtgaaagtagttagaaagggtgttgtatttttagagtagtaatgaattttttttggagagtagattataagaagggaattaatattaatgtgttttttgtataagtattgtatgtgtattgttttatttgattttttatataatttgtgatggaatttttgtttttatttattattaaggggaaattgaggtttaaggaggttagataatttgtttaagtttacgttgttaggtgttgagttgagatttaaatttagatttttcgtttattttatattgttttagattggtagaaagggttaaggaaggtattttaggtagaggggagtagtaggggtaaagatggaggtttggaatgagaaggatgtttgtgaaaagaagttggtaaatggttagggatttggttttttattttttaaggaggagtagagggtgggattttttaggtagttttatttattttagagggttgtaatagtgtgaggtggggcggaggttttggggtttttggaaggtgattgaagtttataagtttggtattgtgtttatggcgtggttggaattagtttcgtttagtagtgttgggatgggagagttacggtttgtaggttagtttttggaagtttagttattattttttttcgttaatattagtgtagtttagtttttgtttttttttagaattaggttttttattggttttagtttattttaagtatttttttattagagtttgatttttagatagggtattcgaagttttttaagtttttgggttattttggtttttaggtatttaagtttttatttaataagtaatagattaatttttgtattgattttattatatatttttaataatttcgttaagtgggtatttttattattgtttttattttttaataaagtttagaaaggaaataaagtttagaaaggttaggttggtcgggtttggttggtggtttatatttgtaatttttgtattttggaggttgaggtgggtggattatttgaggtcgggcgttagagattagtttggttaatgtgataaattcgtagttttagtgaatatttattatacgagtttttaagagaattttttttttaaaattattttttattttgaaatttttgtatttagtaaatttttttttttttattttgtaacgttttatttttttttttttttttttttttttttttttttttttttttttttttttttttttttttttttttttttttttttttttttttttttttttttttttttttttttttttttttttttttttttttttttttttttttttttttttttttttttttttttttttttttttgagatggaatttcgtttttgttgtttaggttggagtgtaatgacgagatttcgttttattttaattttcgttttttaggtttaagtgagttttttggtttagtttttcgagtagttgggattataggtatgttttattacgttcggttaattttgtatatatgtatattttttgagacggagtttcgttttgttatttaggttggagtgtagtggcgcgattttagtttattgtaaatttcgttttttgggtttacgttattgttttgttttagtttttagagtagtagggattataggcgttcgttatttacgttcggttaattttttgtatttttagtagagacggggttttattatgttagttaggatggttttgattttttgatttcgtgattcgttcgtttcggttttttaaagtattgggattataggtgtgagttattacgttcggtttgtattttttttttttagtagagacggggtttttttatgttggttaggttggttttaaattttcgattttagatgattcgttcgtttcggttttttaaagtgttgggattataggtttgagttatcgcgtttaggtataacggtttgtttttattggaaaattttagaatttattttttataattttttttttattttaattttattttttttttcgtttgtttcgtaaattttatttttaaagtcgattttacgttgagtttaagttggtttttataaattgattttttatgttttttaggtttagtaaagtttggaattttattttagggagattgttattgcgattattaatttttggtagttttggtttatgtagttaatatgttgggttttttttggttttattttatggttgtgtagattttttgtgaggatgttgaagtgatttgagcgagtatgagggaagggttagttatagagattatggatttaatgcgggcgttgaaaatagggattagggtaggatttcggttagaaagcgttagtgttaaaggttaaggagatatagcgttttttaaagagggtgcggtttaaaaatcgttaaattagttcgataatattacgtgttttcggttttattaattgaaaattaataatcgttttttttgttttttatggaaataatttcgttttattaattttttcgttttaatgagtcgtgaggttttggcgttttattgagtatttaagttgataattaaatatttgagttttttggttggatattttgttttcggtaagtaagttagtataataattggttaataaagtaagttttatttaatgatttttattttaggcggggtttaatgggaacgtatggttaattagcggcggcgttttttttgcggttttacgtcggtattagttgcggggtaagatggaggcgttgattttggtaggagttggaggggtagtagagatgttgtggtgtttataggggtcgggagttagggtttagttcgagtgggagacggggaaagagagtttcgggtaatttttggggattgagcgttttgttgatttttggaataagtgtgtggtttagtgtaggagttaaagttttggtttagagtaggaagttttgtcggggagagggtatagagtcggtggaaagttgaaggtagtatatggattttttaggatatatagatttgtaggcgtattggattaggattttttaggttgttttttatttttagtattgtggatgatattttgattttaatttattaaattattaaattcgttttatattgtaagaaaagaatatagatgttttgtcgttatagattttttttgatggttttttaagtttgattttttattgtcgattttttgttatatttttttaggaaattgttttgttttcggttttttgttaatttttattatataggtttgttaaataattagtattttattaaagttttgggatatttgataaagttagtatggattgtggaatattttttttagattttttattttgttatttttttttttatttatttagattttaggaattttttttttttttttttttttttgagatcgagttttgttttgttatttaggttggagtgcgtacgtggcgcgattttggtttattgtaatttttatttttcgggtttaagttatttttttgttttagtttttcgcgtagttgggattataggcgcgtgttattacgttttgatgaattattgtatcgttattaaaggttattgtcgtaattatttcggtgtttattattgtgttcggttttttattttttaaataatttatttatttttttttatatttagaattataaatttgtagatattgttaatttttttgttttttttgttttttatagaatttttttggaaaaaaattaaattttagttaaatttaataatttagtttttttatatatatatttaggtagttgaatattgaaggagaaaatttttgtatttggttaattagtattattttaaatttatgtttttaagatgggtgcggtggttcgtgtttgtaattttagtattttgggaggtcgaggcgggtagattatttgagattaggagttcgagattagtttggttaatatggtgaaatttcgtttttattaaaaatataaaaattagttgggcgtggtggcgtatgttcgtaattttagttatttgggaggttgaggtaggagaatagtttgaattcggaagtaggggatgtagtgagttgagacgcgttattgtattttagtttgggtgatagtaagattttgttttaaaaaaaaaaaaatgtttttaaaacgtaatatttttaaataattttgtatttttttggtaaatttttttttttattttgtataatgattgttttatatttttttttttttaatatttttaatattatttttagtttatttttagtagatgattttgttttatgttttattgataaaatagatgtatttagatgagattgttttattttttttaatattaaaatttattagtttatttgtatttatttttatatgtttggttttttattttattaaggtgaaagaaggtagtcgggtatagtggtttacgtttgtaattttagtattttgagaggtttaggcgggtggattatttgaggttaggagtttgagattagtttggttaatatggtgaaattttatttttattaaaaatataaaatttagttgggcgtggtggcgtgcgtttgtaattttagttatttaggagtttgaggtaggagaattatttgaatttaggaggtagagattgtagtgagttgagattttgttattgtattttagtttaggcgatagaatgagatttttttttaaaaaaaaaaaaaaaaagatgagaaaaatatttttttttttaaggaaagttatttttttatagttttgtgaagggatgaaaaaaattggatttttttgagtgtatagttaatatttaattttgttttttagtaacgttgttttttatataggttattatgtgtgatgtagttttgaggaaggttgatgaagtaattaagaggtaggggtggatttttaggtggtagttaaaagagtttatttacgtagtattttaaattattggatgaaagttgtaattatataattttaggaatttttttttttgtggttttaatttttattatagttatatgttagggagatattttttatattttagagataaagttagattgttgttaggttagatgttatttttgggtgtggtggtttatgtttgtaattttagtattttgggaggttaaggtaaaaggattgtttgaggttaagagtttgagattaatttgggaaatatagtgagattttgttttaataaaaaatttaaaaattagttagttgtggtggtatatatttgtagtttagttatttggaggttgaggtgtaagggttatttgagtttaggaggttgaggttgtattttagtttggataatagaggtttttttgttttataaaaaaaaaaaaaaaaaaaaaagatgtcggggttgtggtttatgtttgtaatcgtaatattttgggaggttaaggcgggtaattatttgagattgggagtttgagattagtttgattaatatggagaaatttcgtttttattaaaaatataaaattagtttggcgtggtggtttatgtttgtaattttagttattcgggaggttgaggtaggagaatcgtttgaatttaggaggcggtggttgtagtgagtcgagattgcgtttttgtattcgagtttgggtaataagagtaaaatttagttttaaaaaaaagatgttatttttttattgtttttttaaggtttgattttgtggaggggattcgtttatatttttagattaatagttgtagttgttttaattttgttgtgatgattttgtgttgttttttattatgtagtggttggagtagaattaatttatgattgttaaagtaagagttattgtagttttgggttgggagttagtgtttagagttttatttaattgaattgtgtggttttaggtaatttgaattgtttttttgagtttgtttattangtagaatggaaaaattaaataaaaaaattttttttattgttttttttaagtatataaaataaggttttttttatatttgggttgattagattattaaggatagaaatattgttaattttttttttttaagaatattgaggttgggtacgttggtttatgtttgtaattttagtattttgagaggttgaggcgggcggattatttgagattaggattttgagattagtttggttaatatggtgaaattttatttttattaaatagtataaaaattggttagatggggtggtgtgtgtttgtagttttagttattagggaggttgaggtgggagaatttttggaattaaggcggttgaggttgtagtgagtcgagatcgtattattgtattttagtttgggcgataaagattttgttttaaaaaagaaaagaaaagaaaatatttaagttttggtttgaatgtttatgttaattttggttaattaatttattttggaagaatttatttatgttgattaaatttagaagaatataatatataaattatatggttaatttatatatttttatataaaatttttagtggcgtggtcgggtacggtggtttaggtttgtaattttagtattttgggaggacgaggtaggcggattatttgaggttaggagtttgagattagtttaggtaatatggtgaaatttcgtttttattaaaaatataaaaattagttgtgcgtagtggtgtatatttgtagttttagttacgtaggaggttagggtatgagaattgtttgaatttgggaggttgcggttgtagtgagttaagattgtattattgtattttagtttgggtaatagattgagattttattttaaaaaaaaataataataataatttaattgggttgggcgtagtgatttacgtttgtaattttagtattttgggaggttaaggtgagtagattatttgagtttaatagtttaaagattagtttaagtaatatagtaagatttttgtttttatagaagatttaaaaattatttaggtatggtggtttgtatttgtagttttagttatttgggaggttgaaatgagaggattttttgagtttagaaggttgaggttgtagtgaatcgtgattgtattattgtatttttatttgggtaatagagtgagatattattttaaaaaaaaaaaaaaaaaaaaaaatttttgaattgtataatttttttttttttgagatggagaaatacggatgttttttttgnacgagatgtcggtaattttattnggattgatggtttaatagacggtaagtttttttttgtgttgtgatttttttttcgttaattatggatatagttagtttttttggtagtataggaggtttttattttttttttaggtaaaatgtttatttttttttttaatattttttatttttttaaattgtttttttggttaaaggtagagttagattttttgatnttttgttntgtngttttntgnnntttattntttagggtaatattaggggttattttgttttttttttttgtttttagttttacgtttttagttttttttttttaagatgatgatagtatatgtttgaggatttttaagaataagttgtggaaagaggtaagtagatagtttttttttttttttaagatatggtttaggtttggtggttgatagtagttttgttttttttttttattttggttttgggtttttttgtttgggttagataagaggtttattagttgtaggtagtagaggtatagaaggaatgggttttggagatattggatttttgttttgtgtttttatagggttatttgggttatattttaatttatataattagaagtttttttttttttgaggtaatataattttagtaaagatttagtaagtatttgttaagaattgtgttggtattgtaagtttagtttataagattggtttttatcgggcgcggtggtttaggtttgtaattttagtattttgggaggttaaggtaggtggattatttgaggttaggagttcgagattagtttggttaatatggaaatttcgtttttattaaaaatataaaaattagttgggcgtggtggggtggtatatgtttgtagttttagttattcgggaagttgaggtaggagaattatttgaatttaggaggtggaggttgtagagagtcgagatcgcgttattgtattttagtttggttgatagagttagattatgttttaaaaaaaaaaaaaaaaaaaagattggtttttataaagattttaaaggtatattagaaattgagattgaagttgataaataatagtaggatgaggtttagaatttgattttatttgattataatgttttttaggtattttttttttttgtttttgtatttttatattttaaatttttattggaagtttatatttattagttttttttgtggagtgttagtttttttttttttttttgggtaatgtttttttagagttttgaatatatattgttttttagtttttttttttttgatttgggttttagttgtagttttgttataaagtagtagtgtgatgttgggtaagttattttatttttttgggtttttgtttttttatttgtaaaattagggagttggataaattgattttggaggtttttttttgtttggatagtttagaatttttagtaaatttttattcgtgtttttatttttttttgttagtttttttttttatgttatttttttattttttgatatttattttttttgtatttgttttttttgtcgttagtaagagattttaagtagatttggtaaggtttttttgatttttacggttagatattgtgtttatgtgtacgtatatagatatatcgtgttatattagtatagggaagtaggttaggatgaaggaaatatgggagaggggaagtattttgggaggttaaggtggaaggattgtttgagtttaggagtttgagattagtttgagaaatacggtgaaaatttatttttattaaaaatgtagaaattagttaggtataatggtatatatttgtggttttagttatttaggaggttgaggtgggaggattatttgaatttgaaaggttacggttgtagtgagttatgattgtgttatcgtattcgagagtttgggtgatagagtaagattttgttttaaaaaaaaaaaaaaaaaaaaaaancggttaggtgtagtggtttatatttgtaattttaggattttgggaggttgaggtaggtggattatttgaggttaggagttcgaaattagtttggttaatatggtgaaatttttatttttattaaaaatataagtaatagttaggtatggtggtgtatgtttgtaattttagttattttggaggttgaggtaggataattgtttgaatttgggaggcggaagttgcggtgagtcgagattgtattattgtattttagtttgggtaataagagtaaaattcggttttaaaaaaaaagatatgtaaatagataaatatatgaaaagatgcgtaaattattagttattaaggggtcgggcgcggtggtttatatttgtaattttattattttgggaggtcgaggcgggtggattacgaggttaggagatcgagattattttggttaatacggtgaaattttatttttattaaaaatataaaaaaattagtcgggtatggtggcgggcgtttgtagttttagttatttgggaggttgaggtaggagaatggcgtgaattcgggaggtagagtttgtagtgggttgagattatattattgtattttagtttgggggatatagcgagatttcgttttaaaaaaaaaaaaaattattagttattagggaaatgtaaattaaaattatgagatattatggtttataattattattaggatggttgtaaagaaaatataaaattaaaaaattttgaaaatattatgtgttggtgaggatgtggagaggagaaattagaatttttaaacgttgttggtaatgtaaaatggtgtagttattgcggaaaataatttggtagttttttaagaagttaaatatagggtttggtgtngaggtttacgtttgtgattttagtgtttagaagtttaaggtaggaagattgtttgagattaggattttaaggttattttgggtaataaagtaagagtttatttttataaagaattttttttttttttttgagatagagttttattttgttgtttaggttagagagtaatggcgtaattttggtttattgtaatttttagttttacggtttaggtgttgtgtttgtgatcgatagtagcgtttataaagatttgtaaaaatttttattatttaggagttgtattaggaggattatttgaattcgggtagtaggaggttgtggtgagttgagttcgagttattgtattttagtttgggtaataagagtgaaattttattttaaaaaaaaaaaaaaaaaaaaaaggtttatttagatgggaatgatttgaatatatgttataataatttgatttaagtagaaagtagaaagacggaaaaatttgagttatttatttttgatttaaataattttttataaaaggaatataatattgagataaaatttatttttaaattatttgagttaatatgggaaagttttttttttatatttttttttttagtagaaaaaaaatttttcggtcgggtacggtggtttaagtttttaattttagtattttgggaagtagaagtaggtggattatttgaggttaggaggtcgagattattttggttaatatagtgaaattttatttttaataaaaatataaaatttagaagggcgtggtggcgggcgtttgtaattttatttatttaggaggttgaggtaggagaatcgtttgaattcgggagaaggaggttgtagtgagttaagattacgttattgtatattagtttgggtaataagagtaaaatttttgttttaaaaaaagaaaagaagttaagaaaaaaaattttttatatagtaattttttttaaaatttatagattatatagtttattattttagaggaaattaatatattaatattaaaaggtgtattaagattattatataagtcgaatatatttgggggttgggaagaatttgttgatagttagaaaagttagttttataatgcgattatttttttttttaatattttggtattgttgtttttattttagtttttatttaaaagataatatagtatgatttaaaaagagtttgggttggttaggaatagtgatttatatttataattttagtattttaagaggtttaagtaggtagatcgtttgaatttaagagagcgagatttagtttgggtaatatagtgagattttgtttttattttgaagataaaaaattagggcgtggtggtttacgtttgtaattttaatattttgggaggttgaggtgggcgaattataaggttaggagttcgagattagtttggttaatatggtgaaatgttgtttttattaaaaatataaaaagttagttgggcgtggtggtaggtatttgtatttttagttattcgggaggttgaggtaggagaatcgtttgaattcgggaggcggaggttgtagtgagttgagatcgcgttattgagttttagcgtgggcgatagtgagagattttgttttanaaaaaaaaaaaaaaaaggataaaaatatgtaaaaatttaaattaaaaaaagaattaaagttttgaaagaggtaagggttttgttatgttaattagataggagtgtagtggttatttataggtacgattttattaatgtttaaaatgggagttttgatttgttttggtttatttttatttaggtaatttggtggttttttatttttgggaggttattatattgatgttaaatttaatgtagatatttgatcggtttagtgtattatagtttaaaatttttggatttaagtaatttttttattttaatttttttagtagttgggattacgggtatatattattatgtttggattttaaatgtttttgtgagaatcgaagagagtataagaggtagaatttgattattgtttagtataaagtaggtatttagttatagataatgttgatttgttttagttttttatgaaatttagggtatttttgaaaaaggattaatgtttattttgtttattttaaattttattttttttttttttatttatggtaaggtattagtagtttaatgatagagaaagagttttaagtattttttaaatatttaaatatttttagtggaaatgggtttaataaatatttttaaaattttttggtgttattttagtttttatttgttagtgttttagaggttttttaaattttaatagtttttatttttagtggaagttgtgatattatttttttttataaatagagggtattttttgattgttgtgttatttatatttgtattt

SEQ ID NO: 119 - DNA, 6397 bp, Artificial Sequence
  chemically treated genomic DNA (Homo sapiens)
atgtttttataagacgaaatgatttggacgtggatatagagggataattatatgaggatagggagaagatggttatttgtaagttaaggagagaagtttttaagtaaattaatgttgttaatatattgttgttgaatttttagtttttagaacgataaaaaatatttttgttgtttaagttatttagtttgagatattttgttttggtagttttaataaatatattttttaagggtttatttttatttttggtttagtgtattttagttgatgattatagtttaattttttttttttttttggggttttttttttttgtattttttttttttatattttatataggtagatttgtttttgtttttttatttatattacgagtttcgtatagtttttttttttttggtttcggtttttttattaatttttttgttattaacgttattaattcgttaaattatttttttatttttttaaatttttattaattttggtattttataagtgttagttaaataaatgaagaattatattaattttttttttttttttttttattttaaatttttggtgagatttttttgtatttatgttttcgtttttttattttttatttatttgttagtttttttatttttggttttttttattatattgaaatatatttgaaaaagttatgtaagattatagttattgcgtattagtgttatttgagagttaataaagttttttttttttttaagatagcgagtagagtgaatagaagaaagattggtttttgtttttggttgtatagttatgtttcgaggtcgggtttaggattttataatttataaagttaattgtttttttttttttttattttttaggaattgtttgtagtatttgatattgttgagagtttttatattttttaaatttttttttttttggttttttgagttttttttttatttttgatggtattgtaggagtttttaagtattttttttttatattaattttagaaataaagttatttttcgaatttttgtatttagttttttgttttttaattttttgattattaatgttttagaaatatttttttgataattatcgtatttttgtagttgtttttatttttaacgttatgtttttttgagtagtagttttgagtttttaattgtatatttattagttatttttatatggatattttattaaatttgttatattaaatatgtttaaaatatgtatgtttatatgttatatgtatgtttggtatgtgggaatgtattatatttttatagatttttttttagttatagtgttattattttaattatttagattagaatatttagagttatttatgagttttttttttatttaaattgtatatataatttataaataggttttgttgattttattttttaaaaattttttatatgtttttttttatattattggataatagtttagtgtggtggttaatattatgtatattggagttaaatttgttaggtttaaattttgattttttttttatttattaattatgaaattttaggaaaattatttaattttttatttgtaaatatggggattataatggtgatttattttatatgattgataattaaataagtgaatacgtgtatagtaggtattaattatatgtttagtcgatttattttaattttttaattaattagaagaattgtagttttttgtttttttgtatttaagtggggttatggaatgtgggtagaagtgttgtgttatttttatttagaggtaattaaaaagaagatatattttttttatgtttttattgttaatgaatatattatatagattttaattttagaattttttttatattggtatttttaaaatagttttatgagaagggaaatttgtgtagttttaatgatttagtgatgttatggtttgggtatttgttttttttaaattttatgttgaaatgtgattttaattttggaggtggggtttaatgggagatgtttcggttatggaggtggattttttataaatagattgatgttattttttgtaaggaggagaggatgagtgagtttttattgtattagtttttatgagagttggttgttaaaaagtttggtattttttttttttttttcgttatacgatttttttgtatatattattcgtttttgttttttattgagtggaagtagtttgaggtttttattagacgtatatgttggtgttatgttttttgtatagtttgaagattgtgagtttaataaatttttttttattataagttatttagttttgtgtattttgttatagtaatataaatgaattaagataagtgataaatataaaataatttgttttttagataatattgatgtttgaaattttatattgaggtatttttttttttttcgtagtttgataatggtaaatattttttgatattttaggatggatgaatttgtaagagatatttttggaagtaggtttgtatagtgtagagaaaatgttgggtaataaagtaggaatggaggagggttaattagtaagttaaaaagtttttatagttttgtttgttgtgttgtatggaattatatttttttaaaatatatgtttaagttttaattataggtatttgtgaatatgagtttatttggaattaggatttttgtaaatgttattaagttaagatgaggtaatattggattggggtgggttttaaatttaatgattggtgtttttataaaagaaaggtgagggagagttgaatatagcgatataaaggaaatacggggaaggagattatgtgataatgtaggtatagaatggagtgttgtagttaagttaagaatggtaaggattgttggagttattagaagttaggaggaggtaaaggatttttttttagagtttttagagggattatggttttaatggtattttgagtttagaattttaggttttaggattgtgatagaataaattttcgttgtaagttgtttagtcggtggtaaatttttatagtagttttaggaaaatatgtttgtttaatattttattttgaattttaagtttattttatggaattattttgagtttggagtttgatttaattttttttagtaattaacgttttttattttttatttttaaatatgttatattggttttatttttataataattgtatttatttattttttggtaatggggttgttattttttgtagaatgaaaagtagagtgtgtatgtttatattttttttttttttttttttttttttttttttttttttttttttttttttagagtatcgttttgtttcgtttaggttggagtgtagtggcgtaattttggtttattgtaatttttgtttttagggtttaagcgatttttttgttttagtttttggagtagttgggattataggcgttcgttattacgttcggttaatttttttgtattgttagtagagatggggttttattatattggttaggttggttttaaatttttgattttaggggatttattcgttttggttttttaaagtgttgggattataggtgtgagttatcgtattcggtttatagaattttttaaaaagttattgtgtttagtttttatggattttttaaattttagttgtttagtttttcggagttaaatgagattatttaaaggtcgattgttggggtttttaaggtcgtttcggagatttattttataggtaattaaatggatcgttgggtttttgtgtgtgtgggttttttttgtttattttttttttttagaaaaatattttattaagaaggtttttataatttattggaggaggaggatggagagtgggtacgaaaggattaggatgaatatgttataagtaatttaaatgttattgtaatattgtttggtgaggatttgattattgatgttttaaagttaagtttttagttgttattttatttagtagtgaaataatgagttttaaaatatatatttcggtttaagtttttttatgtggggaggtaatttattcgaaggtatttttagtttgtatttaatatagtgtttagtattaaagtagtttagatgttagtgaatggtggttattgggaggtttgttagtgggtgttagtagcggtttttttagagaaaaagaaaatttttttttgttagattagtattttatgagttgtgaattaaaattattgttattattattattataattttatttatagtaattattataaaggtttaataatgttttgtagatgaatattttgagtaattgttttataattaggagatttaagatcgtattaaaaattagtagagggttatattttattgggtataagtcgtttatgataacgaaattgtagtttaatttgtgaagagatgtgaatgtaattgagatacgtttaaatggaatatatagatgagttttatttttatatttggtatgtttggatttatgtcgattttttagttgttcgggtttgtttttaggggttatggatcgtatgattttattagcggtattgttatcgtcgtcgttttcgtgttgtttgcgtttttcgattattgattgggttcggtaggcgttttttgggggtttttttatcggttttagtttttgggattcgggagcgttttgttaggaagttagagtttcgtaggggtcgcggcgtttaggtcgtttaacgcgcgtttttcgttcggcgtttcgaagcggtttcgaggggcgggagtcgaggcgagcggtaaggtcgggtcgggggcgtatagcgtttttagaagtgcgggttttttttattttcggtagcgattttatttttcgttttcgttgcgtgcgcgcgtgtgttcgtttgtttgtatgttttttcgacgttagtgggaatttttagttaggaagtgagagagtgagcgagatagaaagagagagaagtgtattagcgagtcggggtaggaagaggaggtttcgttatcggagcggttcggcgacgcgttgatagttttttttgtttttttcgtcggtcgggtcgttagtcgtcgtagttttcggtttgtacgtagttatcggtttcgttttcggagtttagcgtcgtcgaggtcgtagtcgttcggttagtaaggcggcgtcgtcgttcggttatcgcgcgttttgcgttttttttcgttcgcgttgcggttatggcgcggcgttgattggtttggttcggtttcgtcgcgttttcgttcgtttcgattcgtattcgggttcgttcgggtttcggtttgtcgtcgttttttttttttttagtcggtaggttcgcgtcgtttaggagggagagtttattcgcgttaggaggtcgaacgcggattcgttattcgggtaagttaaattcgggcgagtgggggttcggtaggggacgcgtggtttaagttttgtcgtttagtttttcgtattttttttagttttattcggatttttttatttttgcgttaatcgttgggttagatcgtgggaggaggttgatagtagttgagaggtatatgggattagcgatagcggggaaagatatattcggatttcgtaggggttagtcggtcgaagggtcgcggtcgttcggcggttatttttttttacgttttttcgcggggcgggaacgcgaatcggaggggaatttttataaatttttaaaatttttaattttagttttatttgggggatggtgagaaggttggagtgcgttgcggcgcggaggagagagggaaggtggttggtgtagtgtagaattagattttatttaagggcgttttatgaaatgaaagtagaagtgtttgttagtttttttggttgggaaagttttttttagttttttagaattgaataggagagtttatttattttttttttatttttaaaagaaatttggttcgttttttgtttttttttttttttttttttttttttttcgtgcgcgcgcgcgcgcgtatatatatatatatatatatatatatatatatatacgatatagttatttgttataggatttgattttgatttttcggggtttggtatttgagagagaaaataaattatttatttggatatttagagtattttttagatttgattatgtaaaatttttggatagtgttattatgtattatgtatgatcgttgaaataaaaataatgtaaaaataaggtttattttaaatgtaagtttttttatggtttttaaaaatagatattagggaatgtttgttttgatttgttggtttattttgaaatttaaatgggatttaatgatataggatttaattattaagattgatatgtttatggattttgttaagtagaggtttttagtattatagtttatgaaataatta

SEQ ID NO: 120 - DNA, 6397 bp, Artificial Sequence
  chemically treated genomic DNA (Homo sapiens)
tggttattttataaattgtaatgttgaaaatttttatttaataaagtttatgaatatgttaattttgataattaaattttgtattattaagttttatttgagttttaggataaattagtaagttagggtaaatattttttggtgtttgtttttaaggattatagaaaaatttgtatttaggataggttttgtttttatattatttttgttttagcggttatgtataatgtatggtggtattgtttaagagttttatataattaagtttaaaaagtgttttaagtatttaggtaggtaatttatttttttttttaaatgttaggtttcggaggattagaattaagttttatagtaggtgattatatcgtgtgtgtgtgtgtgtgtgtgtgtgtgtgtgtgtgtgcgcgcgcgcgcgcgtacggagggggggaggggggagagagagagagatagagagcgagttaggttttttttagaagtaggagagggatgaatagatttttttatttaattttggggagttggggagggtttttttagttaagaggattgataagtatttttgtttttattttatggaacgtttttaggtgaaatttggttttgtattgtattaattattttttttttttttttcgcgtcgtagcgtattttaatttttttattattttttaggtggggttggggttggggattttaaaagtttgtaagagttttttttcggttcgcgttttcgtttcgcggagggacgtgaagagaaatgatcgtcgggcggtcgcggtttttcggtcgattagtttttgcgaggttcggatgtgttttttttcgttgtcgttaattttatgtgttttttagttattgttaatttttttttacggtttagtttagcggttagcgtaggaatgaggaagttcgagtggggttggagggggtgcggagggttgggcggtaggatttgggttacgcgttttttgtcgggtttttattcgttcgagtttggtttattcgggtggcgagttcgcgttcggttttttggcgcgggtgggtttttttttttaagcggcgcgggtttgtcggttggagaaggaagaggcggcggtaggtcggagttcgggcgggttcgagtgcgggtcggggcgagcgggagcgcggcggggtcgggttaggttagttagcgtcgcgttatggtcgtagcgcgggcggagggaagcgtagggcgcgcggtggtcgggcggcggcgtcgttttattggtcgggcggttgcggtttcggcggcgttgggtttcgggagcggggtcggtggttgcgtgtaggtcgagggttgcggcggttggcggttcgatcgacgggaagggtaggggaagttgttagcgcgtcgtcgggtcgtttcggtggcgaaattttttttttttgtttcggttcgttggtgtatttttttttttttttgtttcgtttatttttttattttttggttggaaatttttattgacgtcgagagagtatatagatagacggatatacgcgcgtacgtagcgggggcgggaggtagggtcgttgtcgggggtgggggaagttcgtatttttaggggcgttgtgcgttttcggttcggttttgtcgttcgtttcggttttcgtttttcggggtcgtttcggggcgtcgggcgaggggcgcgcgttaggcggtttggacgtcgcggtttttgcggggttttggttttttagtagggcgttttcgaattttaagggttggagtcggtagggaagtttttaggaagcgtttgtcgggtttaattaatggtcggggaacgtaggtagtacggaggcggcggcggtggtagtgtcgttgatagagttatgcggtttatagtttttaagggtaggttcgagtagttggagggtcggtatggatttaagtatgttagatataaaaataaagtttatttgtatattttatttaagcgtgttttagttatatttatatttttttatagattaaattataatttcgttattataaacgatttgtgtttagtaaagtataattttttattggtttttggtgcggttttaaattttttggttatagagtagttatttagaatgtttatttataaggtattgttaggtttttatgataattattgtggatagaattatagtgatggtggtagtaatggttttggtttatagtttataaaatattgatttggtagaggggagttttttttttttttgaagagatcgttattggtatttattgataggttttttagtggttattatttattggtatttgagttgttttagtgttgggtattgtattaggtataggttggggatattttcgggtggattatttttttatataagaaagtttgagtcgaaatatatattttagagtttattgttttattattgggtggagtgataattgaaagtttagttttaaaatattagtaattaggtttttattaggtaatattgtagtggtatttagattgtttatggtatgtttattttagttttttcgtgtttattttttattttttttttttagtaggttataaaaatttttttggtggagtgtttttttggaaaaaaaaaataaataaaaaaaatttatatatataaaaatttagcgatttatttgattgtttatgaggtgagttttcgaggcgattttggaggttttaatagtcgatttttaagtgattttatttagtttcgggaggttgagtagttggaatttagaggatttataaagattgaatataatgattttttaagaaattttgtgagtcgggtgcggtggtttatatttgtaattttagtattttgggaggttaaggcgggtggattttttgaggttaggagtttgagattagtttgattaatatggtgaaattttatttttattaataatataaaaaaattagtcgggcgtggtggcgggcgtttgtaattttagttattttagaggttgaggtaggagaatcgtttgaattttggaggtagaggttgtagtgagttaagattgcgttattgtattttagtttgggcgagatagagcgatattttgagaaagaaagaaagagagagggagggagagagggagggagggagggaggtgtgagtatatatattttattttttattttgtaaggggtggtagttttattattaaaagatagataaatataattgttataagagtagagttagtgtgatatatttgggagtaaaaaatgaagagcgttaattattgaaaaggattaaattaaattttaaatttaaaatgattttataaaatgaatttaaaatttagggtagggtgttgagtaggtatatttttttggggttgttgtaaaaatttattatcgattgaatagtttataacgggaatttattttgttatagttttggagtttaaaattttgaatttaaggtgttattaaggttatgatttttttgaaggttttagggaagaattttttgtttttttttagtttttggtagttttagtaatttttgttatttttggtttggttgtaatattttattttgtgtttatattgttatatggttttttttttcgtgttttttttgtgtcgttatatttaatttttttttattttttttttatgaagatattagttattggatttagagtttattttaatttagtattattttattttaatttgataatatttgtaaagattttagttttaaataaatttatgtttataggtatttgtggttaggatttgaatatatgttttggggggatgtaattttatgtagtatagtaggtaaaattataaaagttttttggtttgttgattaatttttttttatttttgttttgttatttaatattttttttatattgtataaatttgtttttaggaatattttttataaatttatttattttaaggtgttagaaggtatttgttattattaggttacgaagaggaaaaaaatgttttaatgtggaattttagatattaatattgtttaaaagataagttattttgtgtttgttatttgttttagtttatttgtgttgttatggtagaatatataagattaggtagtttataatgaaaagaggtttattaggtttatagtttttagattgtataagaagtatggtattagtatatgcgtttggtgagggttttaggttgtttttatttaatggaaggtaaaggcgggtggtgtgtgtagagagatcgtatggcgagagagaggggagagatgttaaattttttagtaattagtttttataggaattaatgtagtgagaatttatttatttttttttttttgtagggaatagtattaatttatttgtgagggatttatttttatgatcgaaatattttttattaggttttatttttaaaattggggttatattttaatatgaggtttagaggagataaatatttaaattatagtattattaaattattgaaattatataaatttttttttttatgaagttattttggaaatattagtgtggagagaattttgaggttgagatttgtgtagtgtgtttattggtaatgagaatataggaaaagtatgttttttttttaattgtttttgagtaaaggtgatataatatttttgtttatattttatggttttatttagatgtaagagagtagggaattatagtttttttggttggttaggaggttgaaataggtcggttaagtatatggttaatatttgttatatacgtatttatttatttggttgttagttatataaagtggattattattataatttttatatttatagatgaaaagttgaataatttttttaaggttttataattagtaaatagaaggagagttaggatttgaatttaatagatttggttttagtgtgtatgatattaattattatattaaattattatttaatgatataaaaaggagtatgtaagagatttttagaagatgaggttaataggatttgtttatagattatatatgtagtttgagtgagaggaagatttatagatagttttgagtgttttagtttgagtgattagaatagtaatattgtaattgggaaaaaatttgtgggaatgtaatgtatttttatatattaaatatatatgtaatatgtaaatatatatattttagatatgtttagtatgatagatttagtgagatgtttatatggaaatgattaataaatatgtaattgaaaatttaaggttgttgtttagagagatatggcgttggaaatggaaataattgtaaagatgcgatagttgttaggagagtgtttttaaaatattagtggttaaagagttaggagataaggggttaagtataggaattcgaggaatgattttatttttggggttggtatgagagagagatgtttaaaaatttttgtagtgttattaaaagtgggaggaaagtttagaaagttagagaagagagagtttaaagggtatgagagtttttaatagtgttagatattgtagatagtttttaaaggatggagaggggaagagatagttgattttgtgaattataaaattttaagttcggtttcggggtatggttgtgtagttaagggtagaaattagttttttttttgtttattttgttcgttgttttggaggaaaagggaattttattaatttttaaatagtattgatacgtagtggttgtggttttatatgatttttttagatgtgttttaatataatgaggaaaattaagaatgaggagattgataagtgagtgggaaatggggaaacgagggtataagtgtaaaagaattttattaagagtttggagtgagagggaaggaaagaggagttagtgtgattttttatttatttgattaatatttatggagtgttagagttaatggaagtttggaaaggtggagagatagtttaacgagttaatagcgttaataatagaaagattaatgagggagtcggagttagaagaaaggagattgtgcggagttcgtaatgtaggtgaggaggtaggaataaatttgtttgtgtgagatatgaggaggaagagtatagagaagagaggttttaagaagagggggaggattaggttataattattagttgaaatatattaaattaaaaatgagaataaatttttagagaatgtgtttgttagggttgttaaaataaaatattttagattgggtggtttaaataatagaaatattttttatcgttttagagattggaagtttaatagtaatgtgttggtagtattggtttatttgagggtttttttttttggtttgtagatggttattttttttttgtttttatgtggttgtttttttgtgtttacgtttaaattatttcgttttataaggatat

SEQ ID NO: 121 - DNA, 7903 bp, Artificial Sequence
  chemically treated genomic DNA (Homo sapiens)
ttgtttatggcgttattggttttgattggttggtatttgtattttatagataagttattttaatattatttttggtaaatattgagtgttttaggtattgtttgatttttatttatggggtgggatttttttatttagattgagaatagttaggttattgaggtgtattaatttgttaggatataaaaaatattatagatagtataaacgataaatatttatttttttatagttttggagtttggaagtttaagattaagatattggtaggtttgtttttttttgaggtttttttttttagtttatagatggttatttttttattgtggtataaatggttttttttttatatatatttttgttttttttttttttttttttttttttttcgtgtttttagagatagggttttattttgttatttaggtaggagtgtagtggtgtagttatagtttgtggcggttttgaatttttgggtataagtagttttgttattttagttttttaagtagttgggatgataggtgtatgttattatgtttagttaatattttaattttttgtagagatagggttttattatgttgtttaggttggttattggtttttaatttttgggtttaagtgatttttttgttttggtgtttaaatgttgggattataggtgagtattattttgtttggttttttttttttttatgagaataatagttttattggattgtggttttattattatgattttatttaaatttaattatttttttaaaggatttatttttaaatatagttataatgaggattagagcgttaatataagaatttgggggaatatattttattgtgttatataatagaatagattttaaagtatttttttttttagatttttaataaagtgataattagtatagtgtgtatatggttagaggatggggtggaaaatatttgtttggtttttatgatttaaagtgttttaatttgatttttttttttttatatattttatatgttttattttttttttttttttttttgaagtggtaatttattatttgtgtgaaaataatataattttttattgtattttaaaggtatagaaagtttttggtaatgtgtagagtgagttaattaagacgaggggtagtttgtcgggggttgggtgggattgggtagggtgtgatttggttttaaagaattaatttacgttaattatattgggattttgtttttttgtgttttttgttttttttgggttttagttttttgtttttttttttagggaatttttggtttttttttttaggagttaaggtttttggaatagagggtggtaggttagttttttatttttgttttgttttttttgttattgagtgaggtatagatggaagttttatttttagaaaagagaaataaaagtgatttttataatagaaagagaagggttggatgtgttggtttatgtttataattttagtattttgggaggttgaggtgggaggattatttgagtttaggagtttgagattagtttgggtaatatgaagatattttatttttaaaaaaataaaaataaaaaataggcgaatgcggtggtgcgtgtttgtagttttagttatttgggaggtagaggaaagaggatcgtttgagtttaggagattgaggttgtagtgagttgagattgagttattatattttagtttgggtggtagagcgagattttatttaaaaataaataaataaataataataaaaaaaaaatagggaaaaattttaaaatgttttaattttagtaattggagaaaatggaagattaaagattatggtgataaggggagtagatattttattttattttttgagatagggttttattttgttatttagattggagtgtagtggttttattatagtttattgtagttttgattttttgggtttaggtgatttttttgttttagtttttttagtagttgggattatagatgttattatatttggttaatttttgtattttttgtagagatgagattttattatgttgtttaggttggttttaaatttttgggtttaagtaatttttttgttttggttttttaaagtgttgggattataggtttgaggtattgtgtttggttagggatagatatttttaaaatcgtatatttagtttgtgatttagagagaataagagattttagttgagagggtaggaataaaatacgttttataaggtaatattgagtgatttagaatttatttttgttatttttttttagtttttttgattttgcgggtggagggtaagtgtgttattaagtatgtttttggataaggagtttttttgaagatagaagtgatgagaagatagaagaaaaggtaataaggtattaatgaattttaattatattaagattgatgatcgtttggtttttgtttataggaatgttataggaatttttttattttaaaagtaaataataaagtatagttttagttttttttatgtggatataaggtggtagtgattagaaaagataagaatagtgttgtgttttagtataaaaacgtaattatgttatgtaatatggtagttattaattatatgtgattatcgagaagttataatgtaattagtatgattaggtaattgaattatttttattatattttattttaattaattttattatttttaaatagttatatatggttagtgttttttgttttgaatagtgtgggatttattggtattgataggttggatatatttttagtttttattttgatttaatttatggttaggtgagtttagaaagaataaaagagaaagagataatggagattaattataatagttagtatttaatgtgtgtttattatatatttaggtatttatttaaatatgtaaaaggtattttgtataatttttgtaaaaatattaagattattgttattttatagatgaaaaaattgaagtataataagaattttatttgtttagaattatacgagtaaataaggggtgaagatggtatttatatataggtagttttattagagtttatttatttatattatatagatttaggaatgaggtggtatggagtgattggggttatggtttttaaattgtgttaaagtataagtttataagggtattgtggaatatttttaatttttagaggaaatatagtaatattttatattttttaaatattgtgtgatttattaatttgaggtgatttatagttggaatattagattgtgttatattttttttgatgataatatatttggttaggtgtggtagtttatgtttatatttttagtattttgagaggtcgaggtgggtagattagttgaagttaggagtttaaggttagtttggttaatatggtaaaatttcgtttttattaaaaatataaaaattagttaggtatggtggtaggtatttgtaattttagttattcgggaggttgaggtaaaagaatggtttaaatttaggtagtagagattgtagtgaggtaagatcgtgttattgtattttagtttgggttatagagtgaaattttgttttaaaaatatatatatatataaagataatatatttttataaaagatggttttagaaggtttttttgataaaaattaagtattaagtaaaaaaaaaaagtattgtgtaaaaattagtatggaatagaaaatgagggtggtagtattggatttttgtatgtgagaagttgagtagtgttaaatagatgtatatatttcgtaagtaattgtttgtggttatttaagaacgaaattttttttttaatttgtgtgtattgttatttttaaagtgttagtaagtttttaggaattagttatttattttgttgtttaggttggagtgtaatggtgtgattttaggttattgtaatttttatttttcgggtttaagttattttttttgttttagttttttaagtagttgggattataggcgtttgttattacgtttagttaattttttgtatttttagtatagatggggttttgttttgttggttaggttggttttcgatatttgattttaggtgatttatttatttcggttttttaaagtgttgggattatcggcgtgagttatcgcgtttggtttttatatataaatttttttttaattttttaaattaaaaattaaatgtaaatttaatgtaaaaatgtaaattaaatgtaaaaattaaattgtaaatgtgggtagaagtaatagttgtattttattaaagatacgttatttatgttatattttggtattcgtgtatttcgataatagaatttttttcgtgggaggagttttttagttatttgaattgtttggattaatattgcgtagattaagggattatttgtgtttttatttattaaatttatttttattttttttgtcggtatttaggatttcggaatttttgtttgagaatttttttttttttcggtttgggtttggatgtgtttttttaaattttgtattttttaagttagtattgttgtcgggggcgatttagttttttttgtttagggagtaatttagatatagtttcgttttatttttattttggggttgtataatttaaggtatgaaattttttttttttgaattttttacggtttgttattgatatagttggaatgaggttgtaaggagagggttgggggtttttttttttatttttagttttattttcgtataggtttttttgttgggaatttttgttttgcggattggaatgggtatcgagatgaaatgttgggtgcgtttcggtttttttcgttcgtttcggggtagaaggtttagggttgggaagaattttgattaggtttatagtttaggtttagtcgattgaattagggtgtgttattatggagatagggtcggttcgcgtgttcgtttgttattggttggggattttagggtaagggatataagttagagtttagattagtgagttaattgtgcgaattagattcggtagttttgtttagtttagtatagcggagcggattcgatcggatcggagcggatcggagtatatcggagtaggtttatcgagaaggcgtttgcgagattatggagaacgggtgaggagggtattaggttcgtaggatttttggggaggggtaggtgttgtgattcgggaatttggtatattgggtttagagggagttggcggagggagcgagcgtttaggggatgtagagaggtttggtattgagtttagtgtcgggagtaaggcggtagagttatgcggtagttagcgcgggtagggacgtacgcgggaatcgagttggggtggcgttatcggagtaggaaggggataggtcggtgcggtttaagttatttcgtaaaagtagtcgttgtgtgttttcgtgtgtgtgttaggggaataagtggagagtgagtatatgtatatattttttattttatattaggaggaggtttttttattttttgcgttttttataaatttttatgttagggtttgggtaaagttgcgaggtatttttggtgtttaaattcggagttttttttttagaggtaagattatttattttttttgttagttgtattttttttttttttttagattggtagtatgattaattcggtgggaagtgattgttaagtggagacggaaattagttatcgaattgagtaatagttttgtgtttattttttttattttacgtttttgaaaatttttttttcggtttgggttttggatattttagtttaagtgatttgtattaggtattatagttgtttttggatgtttagggagttagggtgtttttgaggggattgatagttaatgaggaagtgttgtgagatgtggttagatatgttatgtggcggtagttttatatatttattttttttgtattttttggggatgttatttgattaatattttattagtttaattgtttttttttattgttttgtggtttcgttgattagtttttaatttatttgatttaattgtttttttgagggtagtttggtgtattgtgtaattatgtttggtttttcgggttttgttttttaagtaaaaaattttttgtgaaagtttggttagttgtgtttagttttgttatattttattgttatttttgaaagtaacgtttggtttttttagatggatgtgagagaattggatttggaattgggagaaaagtaatacgggttgatttttgttagtgtaggggttttgggtaagtgttttgaggtttttgaagagtaaagattttcggtggagagaaaggaaattgggaggaggtagggagggggaaggataggaagaagattataggtaggtggaaagtaggagaaagatttaaatattttgtgtaatagagttataggtttttggaagttgttagtaagtatttaatttatttttagattgagtttataagatagatggggttaatttatattttttgtttatatttgagaaaataatttaaagtataaattatatgtttaaaaagataatattgggattagaatttaggtcgaattttgtttttttttagattagtaatttttaaatttggttttattttattttatttttatttatttattttggagtcggagtttcgttttgttttttaggttggagtttagtggagcgattttggtttattgtaatttttgtttttcgggtttatattattttattgttttagtttttcgtgtagttaggattataggggttcgttattacgttcggttaatttttttttttttttttttttttttgtatttttagtagagacggggttttaatatgttagttaggatggtttcgattttttgatttcgtgattcgtttatttcggttttttaaagtgttggggttataggtatgagttatcgcgtttagtttttaaatttggttttaaaattaaaattatatgggttttagaatttgttttttgtgggggttttgtgtgtgtgtgtgtgtgtgttttttatagggttttattttgttattaggttggagtgttagaatttgtttttttaataagtttttgttgagaatttgtgtagttagttttggtttaatttttgataattagtattgtggattgggtttgtttttttgtatagtagtttatttagttttttgtttggaattaatttttttgtgatttagggagttaagaatggtacgtagatttttattaggggtggttttattgtgttttattggttaaaataaaaaagaaatgtagtttttaagtttttggttgaggaaggaattggaggaatgagggtttaaaaggaaatttgagtttatttttgtttttatagtagttggttttaattatattttgaatgtttttggggaataggtaaggtaataagggggattttattaggtgggtattatttttaggaagggtttaattttattttgagtattttttttgggtttttttttggttaagtttttttattttttttaatttgattatttttttgtattttttcgtatattttggtttttttttttttaaatttttgttataaggataagtatgtagtttgttagtgtttagtggatttaatattggagttgggtttgttagtagaaataggttttattaatttttgttaggttttagaatggaggtagttttatattagatttgtagtgggtttgatttagaaagaagggtggttgagtagatggaagagtatagtatggtttttttttttgtgttagttttttcgtttttgttgttttagtatatttgttagtttttttgtatcgaaggttatttgtttgtgatgtttttggaatgggagtagaatttattttgatatttttttttttttaga

SEQ ID NO: 122 - DNA, 7903 bp, Artificial Sequence
  chemically treated genomic DNA (Homo sapiens)
tttgggggagaaaaaatattaaggtgaattttgtttttattttaagggtattatagataaatgattttcggtgtaaaaaggttggtaggtatattgaggtagtagggacggagaagttggtatagagggaaaggttatattatgtttttttatttatttagttatttttttttttgaattaagtttattataagtttgatatgaaattatttttattttagagtttggtaaaagttaataaagtttgtttttattaataggtttaattttagtgttggatttattgaatattggtaagttgtatatttatttttatgataaaggtttagagaggaaggggttagagtgtacggggaagtgtaaggaaataattaaattagggagggtaaaagggtttggttaggagggagtttaagaagagtatttaaaatgggattaagttttttttgagggtggtgtttatttagtaaaattttttttattattttatttgttttttaaagatatttaaaatgtaattaagattaattattatgaaggtagagataaatttaaatttttttttgaatttttatttttttagttttttttttagttaaagatttaagggttatattttttttttgttttaattaataaaatataatgggattatttttggtagaggtttacgtgttatttttagttttttggattataagggggttaattttagataaaaaattagataaattgttgtataaaaaagtagatttagtttatagtattggttgttaaaggttaaattaggattgattatataaatttttagtagaagtttgttagaaaaatagattttggtattttagtttggtgatagagtgagattttataaaaaatatatatatatatatatataaaatttttataaaaaatagattttgaagtttatgtaattttgattttaaaattaggtttaggggttgggcgcggtggtttatgtttgtaattttagtattttgggaggtcgaggtgggcggattacgaggttaggagatcgagattattttggttaatatgttgaaatttcgtttttattaaaaatataaaaaaaaaaaaaaaaaaaaaaaaattagtcgggcgtggtggcgggtttttgtagttttagttatacgggaggttgaggtagtagaatggtgtgaattcgggaggtagaggttgtagtgagttaagatcgttttattgaattttagtttgggagatagagcgagatttcgattttaaaataaataaataaaaataaaataaaataaaattaggtttaggaattgttggtttggagggaagtagaattcgatttagattttagttttaatattgtttttttaggtatgtaatttgtgttttaaattatttttttaggtataaataagggatgtaaattggttttatttattttataggtttaatttgaaaatgaattgaatatttgttaataatttttaaagatttatggttttgttatataaagtatttgaattttttttttgttttttatttgtttgtggttttttttttgtttttttttttttttgtttttttttagttttttttttttttatcgaggatttttgttttttagaaattttagggtatttatttagaatttttatattagtaagaattaattcgtgttattttttttttagttttaagtttagtttttttatatttatttgggaagattaaacgttgtttttagaggtggtaatgaggtgtgatagagttgaatataattaattaagtttttataggaaattttttatttggaaagtagagttcgggaaattagatatgattgtataatatattaggttatttttagggaagtagttggattaggtaggttgggggttggttaacggagttataggataatggagagaagtaattaagttggtaaaatgttaattaaatggtatttttaaaaggtgtaaaggaaatgaatgtgtgaagttgtcgttatatggtatgtttagttatattttatagtatttttttattggttattagtttttttaagaatattttggttttttgggtatttaaaagtaattgtgatgtttaatgtaggttatttggattgggatatttaggatttaagtcgagagaagagtttttaaaggcgtggggtgggggaagtgagtataggattgttgtttagttcggtgattgattttcgtttttatttagtagttattttttatcgagttaattatattgttagtttggaaggaagggaggagtgtaattggtaaaggaggtgagtaattttgtttttaaaggaggaatttcgaatttgagtattaaaagtatttcgtagttttatttagattttagtatgggaatttatgaagagcgtagggggtgaggagatttttttttggtatggagtgagggatatatatatatatttattttttatttgtttttttaatatatatacggagatatataacggttgtttttacggagtagtttagatcgtatcgatttgttttttttttgtttcggtggcgttattttagttcgattttcgcgtgcgtttttgttcgcgttggttgtcgtatgattttgtcgttttgttttcgatattaggtttagtgttaggtttttttgtattttttgggcgttcgtttttttcgttagttttttttgggtttagtgtgttaggttttcgggttatagtatttgtttttttttaagggttttgcgggtttggtgttttttttattcgttttttatggtttcgtagacgttttttcgatgagtttgtttcggtgtgtttcgattcgtttcgattcgatcggattcgtttcgttatgttgaattgagtaaggttgtcgggtttggttcgtatagttggtttattggtttaggttttggtttatattttttgttttggagtttttagttaatggtaagcgagtacgcgggtcggttttgtttttatggtgatatattttaatttaatcggttgaatttgggttgtaaatttaattagagttttttttagttttaaattttttgtttcggggcgggcggggggagtcggagcgtatttagtattttatttcggtatttattttagttcgtagggtaggagtttttagtaagaaggtttatgcggaaatagggttagaagtagggaggagagtttttagttttttttttgtaattttattttagttgtgttaatagtaaatcgtgagagatttaaaaaggaaaaattttatattttagattgtataattttagaataaaaatgaagcgagattgtgtttgagttgttttttggataagggaagttgggtcgttttcggtaatagtgttaatttggaggatatagggtttaggagagtatatttaggtttagatcgggagaagaaaaagtttttaggtaagaatttcggggttttagatgtcgatagaaaggataaggatggatttggtgggtagggatatagataattttttgatttgcgtaatattgatttaagtaatttaggtaattagaggattttttttacgaagaaaattttgttatcggaatatacgggtattagaatataatataaatagcgtgtttttggtagaatataattattatttttgtttatatttataatttaatttttatatttaatttatatttttatattaaatttatatttaatttttaatttaaaaaattaaaaaaaaatttatatataaaggttaggcgcggtggtttacgtcggtaattttagtattttgggaggtcgaggtgggtggattatttgaggttaggtgtcggagattagtttggttaataaggtaaaattttatttgtattaaaaatataaaaaattagttgggcgtggtggtaggcgtttgtaattttagttatttgggaggttgaggtagggagaatggtttgaattcgggaggtggaggttgtagtgatttgagattatattattgtattttagtttgggtaatagagtgagtagttggtttttgagaatttattagtattttgaaaataataatgtatataaattgaaaaaaaaatttcgtttttaaataattataaatagttatttacgggatatgtatatttgtttggtattatttaattttttatatgtaggaatttaatgttgttatttttattttttgttttatgttgatttttatatagtattttttttttttatttaatatttaatttttattagagggattttttaaaattattttttgtaaagatatgttgtttttatatatatatatatttttgagatagggttttattttgtaatttaggttggagtatagtagtacgattttgttttattgtaatttttgttgtttgggtttgagttatttttttgttttagtttttcgagtagttgggattataggtgtttgttattatgtttggttaatttttgtatttttagtagagacggggttttgttatattggttaagttggttttgaatttttgattttaattgatttgtttatttcggttttttaaagtgttgagagtataggtatgagttattatatttggttagatatattgttattaaaaggaatgtagtataatttaatgttttaattgtgaattattttaagttaataggttatatagtgtttaagaaatataaaatattgttgtgttttttttgaaaattaaaaatattttataatatttttgtgagtttgtattttggtatagtttgggaattatggttttagttattttatgttattttatttttgaatttatgtagtgtaaatgaatgggttttaataaaattatttgtgtatgaatgttatttttattttttatttattcgtgtgattttaggtaagtaaaatttttattatgttttaatttttttatttgtaaaatagtaataattttagtatttttgtaaggattatatagaatattttttatatgtttaggtaaatgtttggatatataataagtatatattaaatgttggttattatgattaatttttattgttttttttttttttgttttttttagatttatttaattataaattgaattaaaataaaaattagaggtatatttagtttattaatattaatgaattttatattgtttaaaatagaaggtattagttatgtgtggttatttaaaagtaataaaattaattaagatgaaatataataaaaataatttagttatttaattatattaattatattgtaatttttcgatagttatatgtggttagtggttattatattgtatagtataattacgtttttatgttagagtatagtattgtttttattttttttagttattgttattttgtatttatataaaagaaattggaattgtgttttattatttatttttagggtaaaagagtttttgtagtatttttatagataggaattagacgattattaattttagtgtgattagagtttattaatgttttattatttttttttttatttttttattatttttatttttagagggattttttgtttaggaatatatttagtaatatatttattttttattcgtaagattaaggaaattaaaaaaaagtggtaggaataggttttaagttatttagtattgttttgtggaacgtattttatttttgtttttttaattgagattttttattttttttagattataagttaaatatgcggttttaaaaatatttatttttggttaggtatagtgttttagatttgtaattttagtattttgggaagttaagataggaggattatttgagtttaggagtttgagattagtttgagtaatatggtgaagttttatttttataaaaaatataaaaattagttaggtgtggtggtatttgtggttttagttattagggaggttgaggtaggagaattatttgagtttaggaagttaaggttgtagtgagttgtgatggagttattgtattttagtttgagtgatagagtgagattttattttaaaaaataaaataaaatatttattttttttattattataatttttggttttttattttttttaattattgaaattaaaatattttagggtttttttttgttttttttttgttgttgtttgtttgtttgtttttagatagggtttcgttttgttatttaggttggagtgtagtggtttaattttagtttattgtagttttaattttttaggtttaagcgatttttttttttttgttttttaagtagttaggattataggtacgtattatcgtattcgtttattttttatttttatttttttagagatggggtatttttatgttgtttaggttggttttaaatttttgggtttaagtgatttttttattttagttttttaaagtattgggattatgggtatgaattagtatatttagtttttttttttttgttatagggattatttttattttttttttttaagagtgagatttttatttgtgttttatttagtggtaggaagaatagagtagagataaaggattggtttattattttttattttaaagattttggtttttagaaagggaagttaggaattttttaaaggaaagagtaaagaattgaggtttaggaagagtaaggagtataagggagtaaagttttaatgtaattaacgtaaattaattttttaaaattaggttatattttatttaattttatttaattttcggtaaattatttttcgttttagttaatttattttgtatattattagaaattttttgtgtttttgaaatgtagtaagggattgtgttgtttttatataggtggtaaattattattttaggaaagaggaaaaaagaaatagggtatgtggaatatgtgaaaaaaaagaaattagattgggatattttgggttatagaagttaagtagatgttttttattttattttttggttatgtatatattgtattagttattattttgttggaaatttaaagaaaaaaatgttttgaaatttattttattatataatataatgaagtgtgtttttttaaatttttatattgacgttttaatttttattgtgattatatttggagataagttttttaaaaaggtaattaagtttaaatgaggttataatggtggggttataatttaataagattgttgtttttataagaagaagagaggttaggtagggtggtgtttatttgtaattttagtatttggatattaaagtaagaggattatttgagtttaggagttagagattaatgattagtttgggtaatatagtgagattttgtttttataaaaaattaaaatattagttaggtatggtggtatgtatttgttattttagttatttgggagattgaggtggtaggattgtttgtgtttaggagtttaaggtcgttatagattatgattgtattattgtatttttgtttgggtgatagagtgagattttgtttttaaaagtacggaaaaagaagagaaagaggaagagaaagtaaaaatgtgtgtagagaaaaggttatttatgttatagtgagaaggtggttatttgtaagttaaggagagaagttttaggagaaagtaaatttgttaatattttgattttgggtttttagattttagagttgtgagaaaataaatgtttgtcgtttatgttatttatagtgttttttatgttttagtaaattaatatattttaatagtttaattgtttttaatttaagtgagaagattttattttataggtaaaaattaggtaatatttgagatatttaatatttattagagataatattaaaatggtttatttgtaaaatataggtattaattaattagaattaatggcgttataaataa

SEQ ID NO: 123 - DNA, 6881 bp, Artificial Sequence
  chemically treated genomic DNA (Homo sapiens)
tgatgtttatgtttattaaaattagtaatgaaatttaaaattaaagttatttttttttgtttaataaaaaatagtttttaaataagaaaatattaagtggttaatttaaaagtaagtatttaggagatggttattgggtgttaagtattaataaaaaatgaaggatttttattatgtaaaatattttttgagtggtatgaggttttattatatgtttagttttataattttaatttataagaagatgtttttagaaaaaagaatgttgttttttttttgtatatttttatatatttttagtattgagttttgtattaaagaaagaaataattttaaaagtatttgtgttaagtggtttttggtaaaaatcggttgagaaatattgaataaaagttataattatttaaaatgtgaatattaataaagtaattgatttgttttttaattattttatgagaaaggaataaataatttggttaattattattttgttaatgtaaatgaaatggtaaaagtaaaataataaaaatatttttagaagtaaaaattaattttgtatttttagaaatagattttttttaaagtgaaaatttattttttgtattagtaatgtgatttattgtttaatggtaataaatgttgtgaatgagtttgtttaaatgtaatttaaaatatatattttgtaatgttaaaaataggttttataaagtaattttattatgaaaaattttaaagttgttttaattcgtaaagtataataggtatgtttgttttattatatttgtattgtaaggtttattttgaatttatttgggaagaatggtgaaataaatttttaaaggttttttttttatgtattaaaatagaaaattttatgggattatatttatgtttgttttttaaattatgttaaaagtttaattttattaagtataatttgtttagttatgtataaaataaattattttggtttagatgtgagtatatgtattatttatgttgatttttaatgaaaatatgtttatatgtattaatatgttttgtttaatattggttaatgttataaaagataatatagtaatattatttttttaaatgtttttttgtggttatttaatagtgttttttaatagtaatgttttttaatttattttagttggttttaaaagaggataggtgtaatttttatttttatttattttaaaaattgttaagaaaatagatttttattgtggggtaattttatatatttatatatggtaatagtttaaagttatatcggttgcgggggtttgaaaaagttattattgttattttaattgagttataaaatattttatttgaattatttatgtttaagaattttgaagggttatagttatataaatgtagaattttagttttttttagtttaaagtatcgttttaatattttttgaaaggttgtttaattttatattttgattttatatgtgtaattaaatttttatgtataaaagtatttttttatgtattagtaaatatatttataggaatttttttttaaattataatttatttaatatgtaattataggattttaaaatatgtttttatttttttaaattgtatgttaatttgaattttttggtgataaaatgagagattttattattagtttgattttttttttttgtgatttaatagtgagttaagtatgagtaggaggaaataaagaaaattttttgtgaatttaattttatgtgttaaaattgttttttttttggagaaaatagaagagaattaaagatttttagttatttatgaattttagtataatatgaatatttgggtttgtagtattttttttggtttagtttaggtagtaaatagtttgtgtgtgtgtgtgtgtgtgtgtgtgtgtgtgtgtgtgtgtgtgtgtgtgagtgatttttttgaacgttgtggagttaggttttttattgattggattagttaattatatatatattggcggtgttattgagatatcgttttattagaatttggtgaggaaaattagtttggggttttgagcgtggttttttttttttttttaaatatttttgatttatatgttgaattttttttaatttattttattcgggttttatagaaattttagtttaagaagtagtttatttaaaattggtttaaacgagtttaatagttttatattcggcgtgtttttttaagaaatagtaaaagttttttagaaattagaataggattttgaagaggagagaatttttatatagatgatggaatagatgagaaaggtttttttttttttttattttaatttatatttaattttatatttaattatatttttagttaataataattgttataataagttgttgtgaaaacgattttttatttttggttgtattaagatttggataaaggttgttattaggaagtcgtattcgataggttgttattaaagaataaggtattatattataatgtttggtttttttggagtttattttaagaattttaggatattttttagttttttggggaggtatttttaaattgttttaggtttaatttaatttaaattgaatgtgtttttaatggtaatgagggagggggaagcgtgtagagtgaatgtatttatttagacgggagtatgtgtatggaggttggtggttataatttttaagttttttcggttttcgtttttttaggattatattaaaaaataataattgttatttcggcgtgtttgtgtttgagttttcgattgtttgaaaatagcggtcgggagtttggtttatcgcggggattaaggaaagtttttcgtggtcgcgttttgttttttcgcggaaggggaagggaattcgggagggcgtttttgagttggagttgttgttattttgggtttagtttggtcggtgcgttaatgtttgcgtttttgcgttatcgttatttttatttttttttttttttttagttttttaaatttttattttttttttttcgttcgtatggaatcgtttttgtttacggggcgttgacgttatcgagtttatgttaatatgttatttttcgtttttttttttttatttttttatttatatatttttattcgttattataattcgttttttttatttattttttggttttattttttttttcgcgttcgttagggtatcgtcgagtagcggcggcggcggtagtagtagcggtagtcgtaatatttgggggaaatttaaggtggttacgtaggttttttcgaggttgcggcgtaaaagagttcgcggttttttggggtagtcgtagggtatttgatggtaacgtttttttagtcgtcggcgagttgggggtagtagggagtaggtaaaggcggggttgtagattagggttgagtagttcgggatttcgaatagttttacggagttatcggtcggtattgagaatacgagtaggggggtaagttgtaaaagggtttcggttgtttggaaacgagttatatcgagaaaggaggggcggttgggacgttttgcgcgagtagaaaagcgggggcggtttcgaatttttttttttaaggtttagtcgttggaagtttcgcgggagaagttttaggaagtttttttagtttcggtcgggagacggggagggggtttgtttttcggagttgcggcgttttttttgttagaaagttttttgcgttttcggcgtggttaggggaaatgatttgtaaagtagaagcggcggcgatttggacggtcgcgggggtgggatacgtttttagagttagttcgggttttttttttggttgggttgtaggtttatattttacgttttgcggagacgttgtttttaatttttattcgtttcgttttttttgtttagtttttttgggttttaagattgaggttgtgatagattttgtgttttaaacgaagatcgatttatttttttaaaattcgtggaaggggtacgagttggtgggtatagaggagtatcgaaagtattagagtttgtagaaggtgggaattagagtatttttttgtagaaggcgtatttgttgtttgttgttcggttgtattgtttgcgaaaggaaaaggggcgacgttttattttgatttttggggtttttaaagagttgggttacggttattgtttatttttttttttttttttttttttttttcgtaagtattacgttttttatcgaacgtgggtattgtatggaaataaggaaatatagaaaaataagttttatttttatttttatttttttttagatgggagtgtggggggtgggggtggggtagagagagtgagagagagagataattagaatgaatatatgttagaagaggaggaggtttgggataggaaaagggagtaaaaggggatgaatcgggtagggaaattttattcgaattgcgtgagttttttgagcgtttcgtgttatgggatatttgtacgttttttcgttaagggggtgacgaaggtgggtgggagaggttagggcgttgtaaggtatattttatttcgtgcggttttaggtgcgtattatttggttacgtcggttttgtttttcgtcggtgtttttgttgtattttttttatatgtgagcggtcgagtcgttgcgcgggcgtaggggtttcggggaaagtgaagtgtcgcgacgttgcgggttgcgtagatttgggagaggttatatttttttcggaaaaaaaaaaagaaaagaaaaaaaatattaaaaattatttaagttggttattaaggtgaacgtagagcggtttttattttaaaatcggttttgttcgtgacgttaggtcggaaatatattaaagcgagcgcgggttaggagtttagggagcgcggtagcgcggcgattgggcggcgggtcgttgacgcgcgttgacgcgcggagattttaggtgtatgttggtagcggtagcgtaagttatataaataaaggtatattggcggttagggttagttcgttcggcggttcgcgtacggtttcgcggttttttttgtttgtttagtcggtcgtttgtttttgtttttttttttcgtgaggtgttcgggtttttttcgtttagtttttttatttttattcgatttcggcgttcgggtttttagagggaattgtatttcggtagagttgaatgaatgaagatagacgcggagaatttttaagtgagtagatgtagtttatgtagttcgtttttttttatgtttttttttttttttgtacgttttttttttttatttgtgtgggataggttttttggaagtgggagttagaggtttttagtgagagtgggatcgaaggatggggagtgcgtgcgcgtagttatcggggggtatttgttcgaatttcggttttggtattagtggggagttggttttcgatagaggtttttaggttttttattggtggacgtggaagggagattttatagtttgggagttgaggattagttcgcggaaatgtgcgtaaagtttgttgttagtgaggaattgattgtggtttgtgaatacggagattttaagttttatgtatacgagggaagttgtttataaattgatagggagaggaagttttttagtttatgcgttgtttgggaattgtgttttcgcggttggttagcgcgcgatgtttttcgggtattgttgagtaagggtggtgttggtagcgtgttttgttattaagttgtttgaaatttttggttttgatatatgttgtttttgggtttgcgaatgtattagagcgagaatatgaatatgtaaagagtatagttatgaaattgtggagttattagggggttaatatttaatataggaatatttttaagggttgtggggttcgagttttttttttgttttttttgggtaattttttttttatttttattattattatgaagtaagattgtgggggaggggaaagaataaaaagagaggatattggttttttttttttattagtaataagattgtttgtgttttagaatgttttttaagtgggaatatttgaaaattgttaggatataagaatgttttgttttagaaaggtagattgtggaaggtattatggggaaggtgtttattttgttgtgttgggaaatatttttaatattggtgttaatattatataagtagtatgttttttttttgtaattgatttaagaagtttttggaaaagtagattttttttttttattttgtgattattaagttttgtgattattaaagatgttgaaagataagttttttggaaaagtgaatattaatttatttgtagttttaattttagtgttttgttaaaagtattttagaagtgcggatgtttttatttaatttgtttttttagttaaggtttttttaatattttgtaagggggaagattgtttttttattttatatttttgatttttattttttttttttttattaaaagaaaaggtaattttattataagaaaaaaaaatgtaagagaaggttttaatgttgtatttttatattttagtttttatatttaggttttgaattaatttaagatggaaatgatttttttatttatattgtagtaaaggggttagtttattatattataaatgttaaatgagtttatggattagttttttttttgtaggattttttttttgtaaggatttatatagtgtaatgggtggtattttttgttgttttaagttattttttttatatatttattttaagtgttatgtttggtaaaggttttttatttatttttaatgagataaatagggaaggtatggaagggtttgtttggtgagtttatatatgtttagttgaatttttgtcgggaagaaattttgaagttttttgtgtttgtattttagg

SEQ ID NO: 124 - DNA, 6881 bp, Artificial Sequence
  chemically treated genomic DNA (Homo sapiens)
tttgaaatatagatataggaagttttagggttttttttcgatagagatttagttgggtatatgtagatttattaggtaggtttttttatgttttttttgtttgttttattggaaatgagtgggaagtttttattaaatatagtatttaaaatgaatgtataaaagaaatgatttgaaataatagaaaatattatttattgtattgtgtaaatttttgtagagagaagattttgtaagaggaaagttagtttatgaatttatttaatatttatgatgtaatgaattggtttttttgttatagtgtaggtggagaggttatttttattttaggttaatttaggatttgagtatgaagattagagtatgaaaatatagtattggaatttttttttgtattttttttttttgtggtgaaattgtttttttttttggtagaggggaagaaagtagaagttaagaatataaaatgagaaaataatttttttttttataaaatgttagaaaggttttgattgagaaggtaagttgagtggaagtattcgtatttttaaagtgtttttgatagagtattgggattggagttatagataaattgatgtttatttttttagaaaatttgttttttagtatttttaatggttataaggtttaatggttataaggtgggaagaggggatttatttttttaggagttttttaggttaattgtagaggggggatatattgtttatatggtattggtattaatattagaagtgttttttagtatagtaagatgaatattttttttataatgttttttataatttgtttttttggaataaggtatttttgtgttttagtaatttttagatgtttttatttggaagatattttagagtatagataattttattattaatgaaaaaagaaagttagtattttttttttttattttttttttttttttataattttgttttatagtggtggtgggggtggggggaagattatttagaaaaagtagaaaggagattcgaattttatagtttttagagatatttttgtgttggatattaattttttggtagttttatagttttataattgtattttttatatatttatattttcgttttgatatattcgtaaatttaaggatagtatatgttaaaattagaaattttaggtaatttagtaataggatacgttattaatattatttttatttaataatattcgggaaatatcgcgcgttggttagtcgcggagatatagtttttaagtaacgtataaattgaagaattttttttttttgttagtttgtgggtagtttttttcgtatatataggatttggagttttcgtgtttataggttataattaattttttattaatagtaaattttgcgtatattttcgcgggttagtttttagtttttaaattgtggagttttttttttacgtttattaatgaggagtttggaaatttttgtcgagagttaattttttattagtgttaaagtcggagttcgaataaatgtttttcggtaattgcgcgtacgtattttttatttttcggttttatttttattagaagtttttggtttttatttttagagaatttgttttatataagtggaaagaagagacgtgtaaaagaaggaaaaagtataaaagaaggcgaattgtatgggttgtatttatttatttaggagtttttcgcgtttgtttttatttatttaattttgtcgaagtgtagttttttttgggagttcgggcgtcggggtcgggtaggggtgggagagttgggcgaagggaattcggatattttacggagggagggagtagggataggcggtcggttggataggtaaaagggatcgcggagtcgtgcgcgagtcgtcgggcggattggttttggtcgttaatgtgtttttgtttatgtggtttgcgttgtcgttgttaatatgtatttaaagttttcgcgcgttagcgcgcgttagcggttcgtcgtttaatcgtcgcgttgtcgcgttttttggatttttggttcgcgttcgttttggtatattttcgatttgacgttacgagtagggtcgattttaaggtgggaatcgttttgcgtttattttggtagttagtttgggtggtttttggtgttttttttttttttttttttttttttcgaaagaggtgtgattttttttaggtttgcgtagttcgtagcgtcgcgatattttatttttttcgaagtttttgcgttcgcgtagcggttcggtcgtttatatgtggggagggtgtaataaaagtatcggcggaaggtaaggtcggcgtggttaggtagtacgtatttggagtcgtacggaatgggatgtgttttgtagcgttttaattttttttatttattttcgttatttttttagcggaagagcgtatagatgttttatgatacgagacgtttagagggtttacgtagttcgggtgggatttttttattcggtttatttttttttattttttttttttgttttaggttttttttttttttggtatatatttattttaattattttttttttttattttttttattttatttttattttttatatttttatttgaaagggaatgggagtgggggtagggtttatttttttatgtttttttatttttatgtagtgtttacgttcgatggaggacgtggtgtttgcgggggggggggagaggaaggggagagggtagatagtgatcgtgatttagttttttagaaattttaaaagttagagtgaagcgtcgtttttttttttttcgtagataatgtagtcgagtagtaggtaataggtgcgttttttgtagaaaggtattttgatttttattttttgtaaattttaatattttcgatatttttttgtgtttattaattcgtattttttttacgagttttaagggaataaatcgattttcgtttgaaatataaggtttattatagttttaattttagagtttagaaagattggataagaaaagcgaagcgggtggggattgggggtagcgttttcgtaaagcgtaaggtgtgagtttatagtttagttaggagaggggttcgagttggttttgggagcgtgttttattttcgcggtcgtttaagtcgtcgtcgtttttgttttgtaagttattttttttagttacgtcgagagcgtagggagttttttagtaaaggaaacgtcgtagtttcggagggtaagtttttttttcgtttttcggtcggagttgggagggttttttagggtttttttcgcggggtttttagcggttgggttttgggagggagagttcggagtcgttttcgtttttttattcgcgtagagcgttttagtcgttttttttttttcggtgtggttcgtttttaggtagtcgggatttttttgtaatttgtttttttattcgtgtttttagtatcggtcgatggtttcgtggaattattcgggatttcgggttgtttaattttaatttgtagtttcgtttttgtttattttttgttgtttttagttcgtcggcggttggggaggcgttgttattagatgttttgcggttgttttaggaagtcgcgggtttttttgcgtcgtagtttcggggaaatttacgtgattattttaagttttttttagatgttgcggttgtcgttgttgttgtcgtcgtcgtcgttgttcggcgatgttttagcgggcgcgagaaaaaaaataaaattaggaagtgggtggggggggcgggttgtggtggcgggtgagggtgtgtgagtagggggatgaggaggggagggcgaagaatagtatattagtatgagttcggtagcgttagcgtttcgtgggtagaagcgattttatgcgaacgaaagggaaaaagtgagagtttggagagttggggagaaggaagggggtgggggtggcggtgacgtaggggcgtaggtattgacgtatcggttaggttgggtttaaaatagtagtaattttagtttagaggcgttttttcgggttttttttttttttcgcgagggagtagggcgcggttacgggaagttttttttgattttcgcggtgggttaggttttcggtcgttatttttaggtagtcggaaatttaagtataggtacgtcggggtggtagttattattttttaatatagttttaggaaaacgggggtcgggagaatttgaaggttgtaattattagtttttatatatatattttcgtttaagtagatatatttattttgtacgttttttttttttttattgttattaaaaatatatttagtttaggttgggttgagtttgggataatttgaaaatgtttttttagagagttgaaaagtgttttggagtttttaaagtgagttttaaggaagttaaatattgtaatatgatgttttattttttaataataatttgtcgagtgcggttttttgataatagtttttgtttaagttttaatgtaattaagaatgaagggtcgtttttatagtagtttattataataattattattaattgggaatataattaaatataaaattaaatataaattaaaatgagagaaaggggagattttttttatttattttattatttgtgtaagagtttttttttttttaaagttttattttggtttttgggaagtttttattgttttttaggaagatacgtcggatgtaagattgttaaattcgtttaaattaattttgaataagttattttttaggttagggtttttgtaaggttcggatgagatgggttggaaaggatttagtatatagattagaagtgtttaaaaaaaaaaaaaaggttacgtttaaaattttagattagttttttttattagattttgatgggacgatgttttagtagtatcgttaatgtgtgtgtaattgattgatttagttagtagggggtttgattttataacgtttaagagaattatttatatatatatatatatatatatatatatatatatatatatatatatataagttatttattatttaagttaaattaaagagaatgttgtaggtttaaatatttatattgtgttggaatttataaataattaaaaatttttgatttttttttattttttttaaaagggaaatagttttaatatatgggattaggtttataaaagattttttttatttttttttgtttatgtttaatttattgttaggttatagaaggaaaaaattaaattggtaataaaattttttattttattattaagaagtttaaattggtatatagtttggaaaaatgaaagtatgttttaaaattttatgattatatgttaaataaattatagtttagaaggagatttttgtgggtatatttgttagtatataagagaatgtttttgtgtatagagatttaattatatatatggaattaaaatgtagaattgaataattttttagaaaatgttaaaacgatgttttaggttaaaagaaattgaaattttgtatttatatgattgtaattttttaagatttttgaatataaatagtttaaataaagtattttataatttaattaaaatgataataatggtttttttaggttttcgtagtcgatataattttaaattattgttatgtataaatgtgtaaagttattttataatgaaggtttatttttttaatagtttttaaaatgagtgggagtaaaaattgtatttatttttttttgaaattaattaaaataaattaaaaagtattattattaagaaatattattggatgattatagaaaaatatttaggaaagtaatgttattatattattttttatgatattaattaatattaggtagaatatattggtatatgtaaatatatttttattaaaaattaatataaataatatatatatttatatttaaattaaagtagtttattttatgtatggttaggtagattatatttaataaaattgagtttttggtataatttagaaagtaaatatgaatgtaattttataggattttttattttaatgtataggaaagaggtttttagggatttattttattattttttttaaatgaatttagaatagattttataatgtagatatagtgaaatagatatatttgttatgttttacgagttgaggtaattttaagattttttataataaaattattttgtagaatttatttttagtattataagatatatattttaaattatatttggataaatttatttatagtatttgttgttattgggtagtaagttatattattgatataagaaataaatttttattttgaaaaaaatttgtttttgaaaatataaaattagtttttatttttgaaagtgtttttattgttttgtttttgttattttatttgtattgataggatagtaattgattaaattgtttgttttttttttataggatggttaaagaataagttaattgttttgttaatatttatattttggatagttgtagtttttatttagtattttttagtcgatttttattaaaaattatttaatataaatatttttaaaattatttttttttttgatatagaatttagtattagaaatgtgtaaagatgtgtagaaaaaaaatagtatttttttttttggaagtatttttttgtaaattgaaattataaaattgaatatatggtaaaattttatgttatttaaaaagtattttgtataataaaaattttttattttttgttaatatttgatatttagtaattattttttaaatatttgtttttaaattaattatttaatatttttttatttaagaattattttttattaggtaaagaagaataattttggttttagattttattgttaattttagtaaatataggtatta

SEQ ID NO: 125 - DNA, 6534 bp, Artificial Sequence
  chemically treated genomic DNA (Homo sapiens)
tttgattcgagcgaaagaaagatttgttagttttttttttttagtattttttttttttaagagtaggatatatagttttagttttttatgtatcggcgttcggaggtaggagtttttggagtggttattcgtttatttttttgttttacgagttaaggaaattaacggattttaaggttttttttatttattttttttagttttgttttcgtttttattttatttatagtttttatttgttttcgtatagattagattttttggtttttttaaggtttaggttgttcgtttttaatataagacggttttttagttaaataaggttttttaatttttattttttttatatatattagatttttttatatatatatatatatatatttcgaatatatatatttcgaatatatatatttcgaatatatatattaaagagtagttatcgaagaatttgttttttaaatattatttttattttattatgaatttttatttaattgagtagaatattttttggaagattagataggatttatttattttttataagatattttatttttttcgttttggagaatcgggcggcggaattttgttttttttgtttgtttaaaaataatttttttagatttaaatgaattaggatattagttgttgtgagatttattttttttttttttttttattgtttttaaaaaaaaaagtatttttttttttttttttttttttttttttttttttttattttttttttttttttttatttttttataaattatatgttttttattgtaaattcgtttatacgttttttggggtttttttagttgaaggagtaaatttatttcggttggtttatattatgttttaatgggatgtttatatttttatttagttttttaattcgaatttatttcgattgatttttcgatggggagaagagcggcgttaatgtttttgataaataattgcggggggtttaatgattgttattgaggtagcggttgcgaaggattacgggtttaattcgggtatttattaattttgtattattatattcggatcggaagtttatgattacgaatttggcgttttgatgtttttttcgtgagttttcggtagtttttttgtgggattgagggtttttcggcgtttgtttaatttttattgtattttgagaattacgtttggggtcgggcgggtggttaggaatttttttgttcgatcgtgttagtttgttagagttcggttttttagacgggaggaaaaaggtttgggtggtagatattattttcgttttttattaggttagggatattattttgtatagattataatttttttttaagatttgtgtttggttgagtatgaagttaatttttagaggttttgagaagtttacgggttatgaaatttttgtgttagtgtttttaagtgcggaggttgttcgttaaagggtgttttatagtttaggtcggttattaaagtgcgattgggttgtagacgtacgtatttaaacgggttgcgagggagaatttttaagttaataagggtacgttttatttaggtttggatagttagttcgttgttatttttatttgtagtgtttttgaaattgggggtagaggcgtagaggggataatagaagttatttttttcgtttattttttttttttttttgttaaattatttaaatatcgtttttaaggttttcgttttatttcgaacgtgtatagagcgtgagtggattttatattcgtttataatatcgttgtggagagttttattgatgttttttgggtaatttgttagtttaggtaaaagttattgttttttaaattagggtttaaggatgtagggcgcgggttttcgttttttaagttttatcgttgggttatttttttattaattagcgtttgtatcgcggttaaatttggtattaggattttttggtttatcggttgcggatagggaagtggtttggatttttatttagttgcggggtttgggtgtggggtggtttgggtttcggagagattttagaaagaaataaaggggaggtttaagattcggagatagagaaagagtggttggaattattcggtatttttgagatttgttgcgttttgttttgcggagttacggttttgagtcgggttaggtttggcggcgtgcgggcgttttaggttaggtagttttagttaattttgttgttttggttattttaggtcggatttcggggatataggttataagaaatttagatttattaagtttttggatgtggtttagttgtttagagtttaagggtgtttttttattttttttcgggtgtttagggatttttggttattggtcggtgagaagggtcgggttgattatttgggtatatatgaattttagagcgttcggtagaaaagaaagaggtcggaaaggagagaaaatgagtcgttttttgatttcggagttttaggtttttagtatttttatatttttgtggtttttatttgtatatgtttatagtaagtgatagttagtttatgaatttatgggtatttaagatttagtttagtcggtagtattttcgtttaacggtttcgcggattttgtaatttacgggatcgggagaaggaattttgtagtaagcgtttttttttagtatttgtcggtttttaggagagaaaattttcggtaggagagagacgggtggacgttgggagggtttggagattaagttttcggtttaaaaataaatgagatttagttttagatgttttttaattgttcgcggggtttaagagtttattttagttgagagttgagtttatttttgtttttttgaaattatatttttggtattttttttatatagtaattatcgttgattttagaaagtgttttgtcgattttgtttaatttttgggaagaagaaaatttggaaaaagtttagtttttaaaatgttatcgttgagaagtggtttaaaacgtacggatataggttttggtggttttaacgttttaaaaagaaaatgagaaaattttttttttgaaaaattgaattatttaatgtaaaattaggttaaataaggtatatgttttttttatgggtttagatatttttgggagttttttgagatttgttttcgtggttttgagggttaattaagttttttggtattaggtaggttgaaagtttgtttggtttttttaatggtgagtgggtttttaaagggttaatttgtggattgttgagcggttatattttatatttttttatattttgttttttgagtttgttttaattagggaatggggaagtagggttgggggttcgagtttacgttaaaattgttaaaggaggtgggggagggggatagagagagaggagtggagaattttttttaggggtaggaaaaatttaaaaattataaaaggaaaagggggaatttgaagtttagaagttattgttttttttattttaaagggaaaaatttgttcgatttttatttttttgattgattaaggttttgaatatttcgcggtttcggagtgatagtttttgaataggttcgagcgaataaagcgtagtgtagagcgcggggttggtattcgggggtgtaaaggaggcgagttcgttggtatttattaagttataaataaaaggttatgtataatggtattttttttaaggatagatagtttttataatatttttggcgttatattttgttggggatattttagtttttagttaagatttcgttttttttatttttttagtagtttagtttgaatgttataataaatttttgagaataaacgttgaattcgggtaaaattttaatatatagatatatttttgtcgacgtatcggggatttatatgtagagatttagaatcgtagtttgttagagcggtttttatattaagaagaggagttaggtttttttttgtatttttttttatatttttagtttttaattaacgagtgtttgggtttagcgacggttgtttgtgttttatattagtttcgtttgcggacggagaagataaaagaatattagcgtattttggattttttttaggaggagttttatcgggaggattttttaataagtttaggttaaggggtattgattataggaaggaaagttaaatatgtttggggttttagatgtttttttattggaattgtgttttttttagtggtagtaagttaagagaaatgagagcgagatttataggtagaaaaaatgagatatagagagagatataggaaattataagaggaatagaggttgagcgagatatatatatagaggtatagaaagagatagagagggaaatagaaagttaaggaaagagtgattagagaaagatatatatatatatatatatatatatatatatatatatatatatatatatagagtgatatagatagagagatagagatagagagataggaattttttcgtttttagtaattgttatttttttggggttgttttttttagtttttatcgggttaatttttttttttgggtaaggggcgtagcgcgggtttttttcggggttagtagaggtttcggtattattagagatgggaagagaaagtggtcgttgttgtttaattagcgcgtgttttcgttattcgggacggtttattcgtcggttaatcgtagtttagggtttttgattaagttttgggtaaaagaattaataaatgttttcgagttcggattttcgtattcggtgttattataggaggagatttaggtaggtcgcgttttagttttattaggtttttcggttcgtcgtggttttttgagttttttttttagggattttagtcgttggaatatttgtttagattcgtattaaattttttcgttttgggttcgggattttggatttcggggttttttcgtttttttttttttcgggttttagtttcggtttttggattaggaatcgatagttttttttttcgcgtttttttttttttttttagtcgttttggggaggggttttttacgtttcggatagttttcgagggttattcgcgtcgtattcgttttttcgtttcgtttttatttggatataattttcgagcgaagttgtttttaggatgattacgttggtcggcgttgtgtttaggatgatgcggtcgggttcggggtagaattattcgcgtagcgggttttcgttggaaggtaagggagggttttagcgcgtcgtttggattttagggtttgggatcggttgttttattttatttttaggtttcgtaggtttttttggtgtttttaggaagtttattttttgggtattttatattttaagaagtattagtcgggggcgaggatttattcgattttttttttgtaaatggagcgcgttgttttttgtaaattttggcggagttgggcggttaggtttgcggcgagtcggggagatttgtttttgttgttttggaaatgtcgcggtggagaaggaggtgaatcggtttttgagcggtagaagtaattttttcgtaatttgtttattcgaaattgtttcgaagttgtttcgaaattgtttcggttgcgtttatatttgtgaaatatatgttagtttaggaagtatttttttttttttgttttgtaaagttgtggtggttaacgtcgcgttattgtgattggaatttttagaataattaaataaattagaattttatgtattttaaatagtatttagaagtttttataatttgtttaggaatcgttttttcgtttatttgaagattttgggaatttcggggaggtaggaagttttgtaagtttgagtcgtttttaatggttttttaggttagggcgttttagtagagatgtttatcgttttcgttatttattttttttatatttagtttagagtagaatgtaatatttagagtaagaatgggggttgggggtttaggaatagttttgtcgttgttgtggtttttgttttaagatgtaataggtgatataggtattgttgtttgggttttttttttggattttttttgatttttggttgttgtatttttggttagaaattttaagggttattagttggtttaagttttttagaaagggagagattttaattggatagggatcggtgggagtagagtttattaaggttagtttttgggtgaattttttttcgttaggaggttgtttttagagtaagttagattttttattagttgtagggttttttaagttgttatttttcgggttcgaaggggaagacgttttttttggggagaattattttgttttatttgttgtttttatataagattatatgcgttatattgttgaataatttgaataaatgtgattgaaaggaggtttgggtttgggagttcgatgtcgagtagttttagcgtcggtgttgtaatatgaggataggatagaagattgcgaaattacgtgttgttgttttttgttttttatttttttttagtgattttttttttgttttttttttttatttttttatagt

SEQ ID NO: 126 - DNA, 6534 bp, Artificial Sequence
  chemically treated genomic DNA (Homo sapiens)
attgtgggaaggtgaaaaagagaagtaagggaaaagttattggaggaaaataaaaagtaaagaatagtagtacgtaatttcgtagttttttgttttatttttatgttatagtatcgacgttgaaattgttcgatatcggatttttagatttagatttttttttaattatatttgtttaaattatttagtaatatagcgtatgtaattttgtgtaaagatagtaaatggggtaaaataattttttttagagaaagcgttttttttttcgggttcggggagtggtaatttaggagattttgtagttggtagagagtttagtttgttttagaaatagttttttggcgaagagaagtttatttaggagttggttttgatgaattttgtttttatcgatttttgtttaattgggatttttttttttttaagggatttgggttagttgatagtttttggggtttttagttaaaagtgtagtagttaagggttaaagagggtttagaaaggaggtttaagtagtagtgtttgtgttatttgttatattttgggatagagattatagtagcggtagggttgtttttgggtttttagtttttatttttgttttgggtgttatattttattttaggttgggtgtgaagggagtgggtggcgggggcgatgagtatttttgttggggcgttttaatttggaaaattattgaaaacggtttaggtttgtaagattttttgttttttcgggatttttagaatttttaagtggacggaaaggcgatttttaaataagttatagaaatttttagatgttatttgagatatatagaattttaatttatttaattattttaaaaattttaattataatggcgcggcgttagttattataattttgtagggtaaaaaaaaaaaaatattttttgaattaatatatgttttataagtgtgggcgtagtcgggataatttcgagataatttcgagataatttcgaatggataaattgcggagaagttgtttttgtcgtttagaagtcggtttatttttttttttatcgcggtatttttaaaataatagggataagttttttcggttcgtcgtaggtttgatcgtttagtttcgttaggatttgtagagagtagcgcgttttatttgtagaaaggaaatcgagtaggttttcgttttcgattggtgttttttggggtgtggggtgtttagggaatgggttttttggaagtattaaaggagtttgcggagtttggggatggggtgaggtagtcggttttaggttttgggatttaggcggcgcgttgaggtttttttttattttttagcgggaattcgttacgcgggtagttttgtttcgggttcggtcgtattattttgggtatagcgtcggttagcgtggttattttgggggtagtttcgttcggaaattatatttaggtgaaggcgaaacggaaaggcgagtgcggcgcggatgattttcgggaattattcggagcgtggagagtttttttttaaaacggttggagagagagggagggacgcggggaggggggttgtcggtttttagtttagaggtcggagttggaattcgggaaaggggaggacggggaggtttcggagtttaggatttcgagtttagggcggaaaagtttggtacgagtttgggtaaatgttttagcgattggggtttttgaaaagggggtttagagagttacggcgagtcggggagtttggtgaggttggagcgcggtttgtttgagtttttttttgtggtgatatcgagtgcggggattcgggttcgggagtatttattagtttttttatttaaagtttggttaggagttttgagttgcgattggtcgacgggtagatcgtttcgggtggcggagatacgcgttgattgggtaatagcgattattttttttttttatttttggtggtgtcgaggtttttgttggtttcgagggggattcgcgttgcgttttttgtttaggagagaaggttggttcggtggaaattgagagagatagttttagggagatggtagttgttgagggcggagaagtttttgtttttttgtttttgtttttttgtttgtgttattttgtgtgtgtgtgtgtgtgtgtgtgtgtgtgtgtgtgtgtgtgtgtgtgtgtttttttttgattattttttttttgattttttatttttttttttgtttttttttgtgtttttgtgtgtgtgtttcgtttagtttttattttttttgtgattttttgtgtttttttttatgttttattttttttatttgtaggtttcgtttttattttttttggtttattgttattggagggggtataattttaataagaaggtatttggggttttagatatatttagtttttttttttgtggttagtgttttttggtttaggtttgttaaggggttttttcgatggggttttttttgggaggagtttagggtgcgttgatgtttttttgtttttttcgttcgtaagcggggttaatgtgaagtataggtagtcgtcgttaggtttaagtattcgttagttgaaggttgggggtatgggggagggtgtagaaaaaaatttggtttttttttttggtgtaaaaatcgttttggtaagttgcggttttaaatttttatatatagattttcgatgcgtcgatagagatgtgtttgtatgttaaagttttgttcgggtttagcgtttgtttttaggaatttattatggtatttagattaaattgttggaaaaataaaaggaacgaagttttggttaggagttgaagtgtttttagtaggatatgacgttaggagtgttgtaaagattgtttgtttttagagaaggtattattgtgtatagttttttatttataatttggtaagtgttagcgaattcgttttttttatattttcgagtgttagtttcgcgttttgtattgcgttttattcgttcgagtttatttagggattgttatttcggggtcgcgaggtatttagggttttaattaattaaaaggatgagaatcgggtaggtttttttttttgaaataaaggaaataatgatttttgggttttaagtttttttttttttttttatgatttttgaattttttttgtttttggagggagttttttatttttttttttttgttttttttttttattttttttgatagttttgacgtgaattcgggtttttaattttatttttttattttttaattaaggtaaatttagaaggtaagatgtaggggggtgtggggtatagtcgtttagtagtttataagttggttttttaaaaatttatttattattggggaaattaggtaagtttttagtttgtttgatgttagaaggtttggttgatttttagagttacggagataggttttaggagatttttagaaatgtttggatttatgaaggaggtatgtgttttgtttaatttggttttatattaaatgatttaattttttaaggggaaaatttttttattttttttttaaggcgttggggttattaaagtttgtgttcgtacgttttaagttattttttagcgatagtattttgagagttagattttttttaagtttttttttttttaaaggttaagtagagtcgatagagtattttttggggttagcggtaattgttgtgtgaaggaggtattagaagtgtaattttaagaaggtaaaagtaggtttaatttttagttaaaataaatttttggatttcgcgagtagttaaagaatatttagagttgagttttatttgtttttgagtcggaggtttggtttttaagtttttttagcgtttattcgttttttttttgtcgggagtttttttttttaagagtcggtagatgttggagggaagcgtttgttgtaagattttttttttcggtttcgtagattgtagagttcgcgggatcgttgaacggaggtattgtcggttgagttgggttttaagtgtttatgggtttataaattagttgttatttgttataaatatgtataaatggaggttataaggatgtgggggtgttggggatttaaagtttcggaattaggaggcgatttattttttttttttttcggttttttttttttttgtcgagcgttttgagatttatatgtatttagatgattagttcggttttttttatcggttagtggttagaggtttttggatattcggagaggggtgggagggtatttttaggttttggatagttgggttatatttaaagatttaatgaatttaaattttttgtggtttgtgttttcgaagttcgatttgggatggttaggatagtaaagttggttgaggttgtttggtttagggcgttcgtacgtcgttaaatttaattcggtttagagtcgtgatttcgtagaatagggcgtaataggttttaggaatgtcgggtgattttagttattttttttttgttttcgagttttgggttttttttttatttttttttgaagttttttcggagtttaagttattttatatttaaatttcgtagttggatgggagtttaggttatttttttattcgtagtcggtgggttaaggagttttggtgttaaatttggtcgcggtataggcgttaattggtaaagggatgatttagcggtggggtttggaaggcgagggttcgcgttttgtatttttgaattttggtttgggaggtagtgatttttatttgggttaataaattatttagaaagtattagtgggattttttataacggtgttgtgaacgagtgtagggtttatttacgttttgtgtacgttcgaaatgaaacgggagttttgaagacgatatttggataatttgataaaaaaaaaaaaaaggtgggcgggggagatagtttttattgttttttttgcgtttttgtttttagttttagagatattataggtgaaaataatagcgggttggttgtttaggtttgagtggagcgtgtttttgttagtttgaaagttttttttcgtagttcgtttggatgcgtgcgtttatagtttagtcgtattttggtgatcggtttgggttgtgaagtattttttagcgaatagttttcgtatttggggatattggtataagggttttatggttcgtggattttttagggtttttgagggttgattttatatttagttagatataggttttaagaggaaattatgatttatgtaaaataatgtttttgatttagtggggagcgggggtggtgtttgttatttagattttttttttttcgtttgaagggtcgagttttggtaggttgatacggtcgagtagagaagtttttggttattcgttcggttttaggcgtgatttttaggatgtagtaaaagttgggtaaacgtcgagaaatttttaattttatagaaaggttgtcgggggtttacggggaggatattaaaacgttaggttcgtgattatgagttttcggttcggatgtgatgatataggattggtgaatgttcgggttaaattcgtggtttttcgtagtcgttgttttagtgatagttattaggtttttcgtagttatttgttaaaagtattggcgtcgtttttttttttatcgaaaaattagtcgggatgagttcggattaagggattagatgaggatgtggatattttattgaaatatggtgtaggttagtcgaagtgggtttgtttttttagttgggggagttttagggaacgtgtgagcgggtttataataaggaatatatggtttgtgggaagataggaagagagaaggaaaataggaaaggaaaaagaaaagaggaaaagaagagagaggtatttttttttttaaaggtagtgagggagggagagaagaataaattttatagtagttggtgttttagtttatttgggtttgagaaaattatttttaggtaaataaggaagataggatttcgtcgttcgattttttagggcgggaagaataggatgttttgtaaaaaataagtaagttttgtttaattttttaaaaaatgttttgtttaattaggtaaaagtttatggtggggtgggggtgatgtttagaagatagatttttcggtaattgttttttggtgtgtgtattcggggtgtgtgtattcggggtgtgtgtattcggggtgtgtgtatgtgtgtgtgtgaaagaatttggtgtgtgtgaaaggggtaagggttgaaggattttatttagttgggggatcgttttgtattgggagcgggtagtttaggttttggaaagattagaaaatttgatttgtgcggaggtaggtgaaggttgtgagtgaggtgggggcgggaatagagttggaggaagtgaataaaagaaattttggggttcgttggtttttttgattcgtggagtaaaaaagtaggcgagtgattattttaggaatttttgttttcgggcgtcggtatataaagagttggggttgtgtgttttgtttttgggggaggagggtattgggaagggggaattaataggtttttttttcgttcggattagg

SEQ ID NO: 127 - DNA, 9243 bp, Artificial Sequence
  chemically treated genomic DNA (Homo sapiens)
tgttatttttaaatttgaaaagattgagagattttagagggtttagatgtgttaaaggttagagggattaatatataggttttattacggaaaggcggggaaaaggttcgaatagaaaattgttgtagaagggaagttattgagaggtaagggagtttttgaataattaaaaagttaagaataagtaaaaggaaggaggtcgggtgggggataaaaaaagtagttgatgtggtaattagatttggtgggagttgggtaggttattttttttttagattagagtttattagaaatttttttagtgtttttttgcgtcgttaaacgtggggtgtggtaatgcgttacgtttgtgcgaggagtgtgcgtaagatatagtagagttgttataagttagatagtaaggaagagtcggtgggataaaaaagtagtatgtgtattagaattggtggagttgggtagttatttttttttcgatcgagttttatcgaaatttttttagtgtttttcgcgtcgttaaagatgataatagtaaattaataagtgtttgaaatgaaaggggatgttgattagtttttaggttatagatttttcgtcgttagttttttttgaatttttatagcgtgtttttgtatcgttttttttaagaagagttattttttatttttatttttaggacgaaggtaagtgtttagttagtatatttattaaatgttagttttggttttagtttttcgtttgcgcggaaagtttattgttatagcgcgtttagtttgtcggagggtagatagaaaaagtaagtttggtttggcgatttgcggggttacgtatttttagggttggttcggagttttttagagtttaacgtttttgggttagaattgtaaggtttcggttcgagtaaagggtttgagttatcgtagtcgtgggagcgttttttttatttgaatgtatttatttataaataagtataaaatttttttaatagtagaggagaaagatttttgttttaaaattaaagttgggaattatcggaaatttcgttttgagtgcgagatattggtttgttatttttttaatttttatattttttttgtaatatgttttgatttaataatttttttagcgtttagtattgttcggacgttttaattgggtaatttattagtgagttaatataggtatttatatatttttttagtttaagtggttaagtattaatttcgaaatgattataaaatatcggaatcggtaacgtatagtaattttaatttatatgtaaattaattggtttattttaaatgttttttttaaaaaaataattattgtattgtagtatcggaggtatggattaaatttttagaatagataattcggaaataagatttggattaggaagataatttagaatagttaataaattaataatgtttgaggtagttaaatatcgttagttattggtatttatatattcgtttgttgttagataaggagttggggaaattgtttgttagggttgagattataatttagagtgaagaaagtaaatggtagtatatagttcgttatagcgggttttgaaataatattgtattttttttaaattttgatttttgggtgatagggagttggcggaggttattttatatttgtttacggttttgttttaatttgattacgaaattgttgttttttttgagttttttaatttgattattattttaacggttttgttatttgttttaatatattggggggaggagtgtaattgagatttttattaaaaattatttgaatttatttagttagtattgttttatttaagtttagttttatgggttgtatttaattttttgtgttttttatatattaaaattagattattaaaatgtcggtaggaaagggtgaaggaaatggtttaatgttttagtttattggaagattattatttttagatatagtttaaaattttgaggaaataaaaaggatatacgttttggggggaaaatgttttaatattttagaatgggggtattattttttttattttagagaattcgtattggagttgtttatgtaaaaatgtaatatttttgaaatttatagatacgtaaggttagtgtttttttttttttaggtttttagtttaggcgatttagttttaaaggagttagtatttttgatgttataattttgtttatatttgtagggtagagaattgtttgttttgtttggacgttttttttatttttttttaatttgaagtaatcggaatttaaatatagtcgttaaggttcgttttttttttattgttttgataagggaaaaatttgaaatttacgttttaaattagttcggtggtttgtagttttttagtattttgtttttacgattgtatgtttaatgtattttttggtgattttgggtattaattagttgtttaataggagtatgattaaaaatgtaaaagaaggattaggagcgtgaaacgtatgtttagttttttttatatattcgaggagggaatgagaattattttgtattttttatttttttaggagttatttgtattttttattagttgtttattttagttgtattggcgttgggtaaggcgaggatttaaaagtttagcgtagtgtttgcggcggtcgggattggggttaattagtttttggcgggcgagattttagatagaaggggggcgagaggaacgtgagtttttcgagttttttttttttagttttggtttgtaaatttttgaaatttgaaaggggagggagttgtacgcgcgtatttttgcgtttttttagcgtaatttttttttttttttttgtgttttttcgcggatttttgaatttttttgtttttggtttttttatttttttttaatttttttatgagattgtttattttcgttattagttgaaggtaaggtcgttttgttacgagcgttttttaatttttataaaatgaaaagaaaaaaagggaggattattagtttattatttagaggaatggggaggttgtaaaaatcgtcgatgggtagaggtgaagatgtttttttcggattgtatttttcggtgttttgtaattagagtttagttgtgggatttgttgaagaaatttgatttttttgtttcggcgagattttaaaaattagaaatagaaatttttagagttagagaggaaatataattaaatagtacgtgggtatttttttttttatttttttttttttaaataatattgttttgagtttttattgggtaaagagagaaagtttgagtttttacggatgttacgtggaggttagaaatggtttaaaatgtagatttttaattagtttttttcgtggttgaagaggttaattttttttataaaatgagtttatttgtcgattgttagttattttaaagtgaagggatttagtatttaaaataaattgagtaagtttgtttgtttgtttttattgttaatttaaatgaatttaaaatacggagtaatttaagaaaatatataatatgttttagatagtttttaaaagtagggaaagtttagtatttatatagtgattagggttagttttaagcgttaagtttttttaaacgtatttattttatgtatattttttcgagttattatatatttttaaaattgcgagtattggtatattgatttaggaagagtaatataatttttagagggaattttatttttaattagggattaaagagatgtttttttaatagcgggtttgagttttgtttttaagtaggaattaatattggtgggaaaattcgaatttaggagtaatggttgtgtttcggtattttttaaaaatatatattaataggatgtttttgagattgaaaaaatattgttttatatgtttggtagaagtttttatatttggttttttaggcgaattatatttatagtttttttatttagaggtaggatagagttaaaatattttgtttattattaaaatatatatttttgtttaagttaagaaattagaaaattagggtttagaagtaaggtatatttttcgagtgagaatatgttttgtaattttatatattttttgttttgtaggagtaaatgtggatttgagggaaatttttttttttatttttatttttatttcgtgtaatttaatattattttcgttaggaattttaatttcgttattttaaaaaatgagatattcgtgatttagggtgaatttgttgaatgtaggtatagtagaggaaattttagattttatgagcgtttgagttttgtttagtgtaaatttttcgtgaatattgggttagtgcgtggtcgtgtttatttgtgcgtcgatatttttagtatgtttggtttattcgttttgatttcgggcgcggtgttttagttaagttgggtttagcgtttcggttttttttagttgataagtttagttcgttcgttttcggttgtggtttttttatttttttttattagtttattttatttttttagatttttttttatttatttttttttatttttatcgcgtttatttttattttcgttttttatcggttttttattttttttttttcgtagtttttttttgttgtgatttttttttttaattttgtaggtttgaaagaaggttatatacgtacgtttatatttatattttatacgtttcgttttaaataattttatgaatattgttttttgtttcgttttttgggttattttttttgtcgtttttttttagttcgttttgatttgttttttaaaagtacgtttttgttttttcgttgttttggcgttttttttttgatttattagggttgtcgggttggcgtagattgttttttttttttttttattttatttttttttttggtttttttttttatagtgggagttcgtgtttttgtttttcggttggtttttaagtgtttcgttaggtttttttttttttcgttttttcggtttcggttttcgatttttcggttcgttggtatttgttttttttttttgtttcgtttttcgtcgtttttgttcgtttttttcggcgttcgttcgggcgttgtgttcgtttttggatcgttagtcgcgtagcgggttcgtcggcgttcgcgcgttattgtgtagtggagtttggtggaatttttgttgacgttacgttattttttatacggagtaggagtagagggaagagagagggatgagagggagggagaggagagagagtgcgagatcgagcgagaaagttggagaggagtagaaagaaattgttagtggcggttagatttcggaggttttagtgtattcgtggattttttcggaatttggtatttttaggagttttgtagtttttttaggttcggttttcgggcgtttgtcgtgtagtcggaggttcggttcgttggaaatcgtttcgggaagtagtgggacgcggagatagtagttttttttcggtagtcggtaagtggaggttatttatttcgtagggatgtgagataatgcgagtttggaaatttgttttatttcggagaatttttatcgtaggtgatttgtggtttttggggttaagtttcgtttaaggtaacgtagtcggtaaatagattttgtaaagttttgtttttttcgtttttcgttatagatattaataatttatagggtgttgaagtcgagagggaagttagatcgtggttggtatttaaaacgaggtatttttttttaaatttcggtgttaatattgtaggaataaattttcgggttaaggattagtatttttaagataaagggttgggtataaagttttagttattggaagattagttttttttttattgttatttattgggaaaaaaaagaaaagaaaaagattttattttaattggtagttagtgattttttaggtttaagcgaattatttgggagttaggtttggatgttaagtttttattatttttttggattgtaatttttttaaattgattattagttaattttaatttggtattttaggagatatattttaaatggatgtagagaattattttttagttggagattaagaaaaaaattttcgattttaaattttcgaaatatgttttttttttttagtttaattattttatttttttaagtaatttagaaattaaattattataaggtggtgtgatttttttttatttttttgtgtgagtattgttttattaaattaaacggaaaaaatttttattattataaatgtaaatattagaatttatatattttaaaatatttttatgaaaaattaatttgatttaaagaaatttttttgtatttgttttagtttattaattaaaattaaagatgtttttattatataaaatattattttggtagaaatttatttaaaatttaaatattaataatattaagaaaataaagtatataagtaaaataaattgaagatttttgttgatgtaatatgagtatataatattttaataattaaattttttttaaaaaattaaatagttattttatttgtggaatgttttattttaatttagtaaaattatatttaaattatttaggtgttttgttttttaagttaagcgtgtttgtttttaaatgtttttaaagtatttatattaattggttgtaaagaacgtatatatatggtaaaatatagaattgaattgagtagtattttaatttttttaaataattatttattataaattaatttattggttaattttataatttagtttatttaaaatatatgtttttgtgttgtttatttttaaattttttattaaagattttgttatggggtaataaagtgtatgaaaaggggggaaatgtgaaaggatttgggattattcgaattgtattttttttgtatttttagttttgcggtagttattagaaattattttttagtaaattgttttattttttagggtttgtttgtttgttttgttatggtttttcgtttttcgttagtcgtgtagtgttttttgtgtgtttataatataaaatttaagttggttaaaataagagtttttggtatatatattttaattagaatatgaattttgggggtgagaattattttttattaggaaaagttttttattttaatttgtgagattagttattgaagttagtttcgaagtttggtagttaaattttttatagaagatttgttttgatagggtaagtttaaggattagtaggcgggaattggaggtttttttttaaaaaattattttttttagttatttagatttagtttttttagtaggtttggttattaaatgaagtataaaaatgtaagttttaaggtttattttgattgtaaaataaatttttaagttataaggatatgtaggagtgagttaaggaatacgttttgattttttttttagtttttagagtggagttttatgagtttttgaagatttgttttgtattgttttgtttggtttttagtattgaagtacggggaagtggggggaagaatgtgtaataattgattgattttatattaagtaacgtaattttttttttttgtatattttattttttaaaaaaaataaataaataaaaattatttgtagttattatttgtagtgtttcggttattagttaataatgtagttagtttagatatataaaaaaaaaagattatcgaaatgatgatgatatgtaaatttttttcgaaattattataagtaaatatttgaagtttggattaataaaattttatttgtgttattttatatcgagttagtagaaagttgtgataatgaattttgtaatattttacgaatagatattttaattagggattaattttgtgattttattgtagaattattaaatttggagtcgttaaattgttatttttgggtttacgggtttataaggatcgaatcggtagagttttcgttcgcgttttcgttagcgggtgggggaatcgtttggtcgtttttattttggatttttacgttatagcgtcgggtagttttttttgtaggtagcgattttggttagaggttttttagggtttagttttttttaggagaggtcgagacgtagggaaacggtatttaggttagaggtaggttcgtagttttttgtttcgtttttgtgttttcgttaattcgataacgtttgtttttatttcgattttcgtattcgcgcgaagtgggtttttcggtcgtcggcgtattttggttagcgtggagagaggtaggcgttgagatcgaaggggtttagggagttttggattttttttttttgtttttaaagtaatcgcggtttttttatttattcggtggagtttttcgagatttatttttttcggtttgtttgtggtagagaagggggagcgcgttaaatgtttggttcgttgcgttgtggttgaaaacgtgaaaaagatttggttcgttcgggagagaaagggggagaattgggtagtagttatattagagttattttttcgtttttggcgggtagtaaattttttaagaacgtttgttttgttttttttagtttcgtttagtttatttagtgttttttttttgcgattttaaattatattttagggtaattatttgtagtaagtaaataaatggtcgggttagtatttttaggagaaagtgtggttaaatatggaaaagtggtttttgatggatgagaggttcgaatttagttcgtttttgaaatattttaggttaagagttcgttcgttttagaattatagaaaatcgagggaaattgttgtttaggataggggtacgttggcgttgatgttttataaatgtttatcgagttttaattaatggataagtattgaagggtggtttttgtatatagttttttaaagagaaaagttttttttatttatttattttcgttgttattgcgtttagatgagtttttaatttcggtatcgagatttttgaaagtaggtttatagtttttttagtatattgtggttttatagttttttaatttttgggtatttttgcggtaattttggagggagatttttttttgataaataaatgttttgggttcgaggttaggttggagatgttgttgtatatgttagaggttgttaggtcggaaaaatacgtttgaagtttagtatatagtaggcgtttaatagttagtgtaacgtagttttatttgagttttgtttattcgacggtcgtcgttttttatagtttttttttttttttgttttgtaga

SEQ ID NO: 128 - DNA, 9243 bp, Artificial Sequence
  chemically treated genomic DNA (Homo sapiens)
tttgtaaaatagaagagaaggaaggttgtaagaagcggcggtcgtcgagtgagtagggtttagatgagattacgttatattagttgttaggcgtttattgtgtgttaggttttaggcgtgttttttcgatttgatagtttttggtatgtgtagtagtatttttagtttagtttcgggtttaggatatttatttattaagaggggatttttttttagagttgtcgtaaaagtgtttagaggttagaggattataaagttatagtgtgttggggaggttgtggatttatttttaagaatttcggtgtcggggttaagaatttatttgaacgtaatggtagcgggagtgggtgggtggagaggatttttttttttgggaagttgtatgtaaagattattttttagtgtttgtttattagttggagttcggtaaatatttgtagaatattagcgttaacgtgtttttgttttagatagtagtttttttcggttttttgtaattttgaaacgaacgggtttttggtttagggtgttttaggagcgagttgagttcgggttttttatttattaggagttatttttttatatttagttatatttttttttagagatattaattcggttatttatttatttattataaataattattttaaagtatgatttaagatcgtagaggagagatattgggtggattgagcgagattgaggagagtagggtaaacgtttttggagggtttattgttcgttaaggacggagaaatagttttggtataattgttatttagttttttttttttttttttcgggcgagttaaattttttttacgtttttaattataacgtagcgagttaagtatttaacgcgtttttttttttttgttataggtaagtcgggagaggtgggtttcgaggggttttatcgggtgggtagaagagtcgcggttgttttaaagataagaaaagaaggtttagggttttttaggttttttcgattttagcgtttgtttttttttacgttaattagggtacgtcgacgatcggagggtttatttcgcgcgggtgcggggatcggggtgggagtaagcgttgtcgggttggcggaggtatagaggcggggtagggagttgcgggtttgtttttggtttgagtatcgtttttttgcgtttcggttttttttgaagggagttgggttttggggagtttttggttaaggtcgttgtttataggaggggttgttcggcgttgtggcgtggggatttagggtggggacggttaggcggtttttttattcgttagcgagaacgcgggcggggattttgtcgattcgatttttgtgggttcgtgggtttagaagtagtagtttggcggttttagatttagtgattttgtagtaaaattataggattagtttttgattgagatgtttgttcgtgagatattataaaatttattattatagttttttattaattcgatatgaagtaatatagatgggattttattagtttagattttaaatgtttatttatgataatttcggaggaaatttgtatgttattattatttcgataattttttttttttatatgtttgaattggttgtattattagttggtagtcggagtattgtagatggtaattgtaaatagtttttatttatttattttttttaaagaatgaaatatataaaagaaaaagattgcgttgtttggtgtaaagttagttaattattatatatttttttttttattttttcgtgttttagtgttgaagattaaataaagtaatataaaataaatttttaagaatttatagagttttattttaaggattgaaaagaaggttaaggcgtgttttttagtttatttttatatgtttttgtgatttggagatttattttgtagttaaaatgagttttgagatttgtatttttatgttttatttaatgattaggtttattagaagaattgagtttaaataattggggaagataattttttaaaaagagatttttaattttcgtttgttgatttttaaatttgttttattaagataagttttttgtgagaaatttggttgttagatttcggaattggttttaatggttaattttataaattgagatgggagattttttttgatgggaggtagtttttatttttaaagtttatgttttagttggaatgtatatgttaaggatttttgttttggttaatttgggttttatattgtgagtatataaaaagtattatacggttaacggaggacgaggaattatggtaaagtaggtaggtaagttttaagaaataaaataatttgttaaaaaataatttttgatgattatcgtaagattgaaagtgtaggaaaaatatagttcgaataattttagatttttttatattttttttttttttatatattttgttattttataataaaatttttaatggaaagtttaaaaataaatagtataggaatatgtgttttaaatgaattaaattgtgaaattagttagtaaattaatttgtagtaagtaattatttaaggaaattaaaatattgtttagtttagttttgtattttattatgtgtatgcgttttttataattaattaatataagtgttttaggaatatttgaagataaatacgtttaatttaaggaataaagtatttaaataatttaagtgtaattttgttgagttaaagtaaaatattttataaatgaagtggttatttaattttttagggaaagtttggttattgaaatgttgtatgtttatgttatattaataaaaatttttaatttattttgtttatgtgttttgtttttttgatattattggtatttgaattttagatggatttttgttaaaatgatattttgtgtgataaaagtatttttagttttgattgatagattaaaataaatgtaaggaaatttttttaaattagattaattttttataaaaatattttagaatgtatgaattttgatatttatatttataatggtaaaagtttttttcgtttagtttagtaagataatatttatataaaagagtaaaaaaaaattatattattttatgatagtttgatttttaaattgtttaagaaagtaaagtggttaaattggaaaagaggaatatatttcggaggtttagaatcgaaaattttttttttaatttttagttggaaaataattttttgtatttatttaaagtgtattttttgaagtgttagattggagttgattggtgattaatttaaaggagttataatttaaagaaatggtgagagtttggtatttaggtttggtttttaggtaattcgtttgggtttgagaggttattaattgttagttaagatggaattttttttttttttttttttttttaatggataataatgggaagggggttaattttttagtagttgaaattttgtatttagttttttattttgagaatgttaatttttggttcgaggatttgtttttgtagtgttggtatcgagatttaagggaagatatttcgttttaaatgttagttacggtttggtttttttttcgattttagtattttgtagattgttagtgtttgtggcgggggacgaaaggaatagggttttgtaaggtttgtttgtcgattgcgttattttgggcgaaatttagttttaaaagttataaattatttacggtgaagatttttcgaagtggaataaatttttagattcgtattattttatatttttgcgggatagatggtttttatttatcggttatcgggagagagttgttgttttcgcgttttattgtttttcggggcgatttttagcgagtcgagttttcggttgtacggtaagcgttcgaaagtcgggtttgagaggattgtagggtttttgagggtgttaagtttcgaaggagtttacgggtgtattggggttttcgaaatttagtcgttattggtagtttttttttgtttttttttagttttttcgttcggtttcgtattttttttttttttttttttttttattttttttttttttttttgtttttatttcgtgtggggagtgacgtgacgttagtagagattttattaaattttattgtatagtggcgcgcgggcgtcggcgagttcgttgcgcggttggcgatttaggagcgagtatagcgttcgggcgagcgtcggggggagcgagtaggggcgacgagaaacgaggtaggggagggaagtagatgttagcgggtcgaagagtcgggagtcggagtcgggagagcgaaaggagaggggatttggcggggtatttaggagttaatcgaggagtaggagtacggatttttattgtggaaaggaggattagaagggaggatgggatggaagagaagaaaaagtaatttgcgttaattcggtagttttaataaattaaagggggagcgttagggtagcggggagatagaaacgtatttttggggagtaaattaggacgggttgggaggaagcgatagggaaagtggtttaagagacggaataaaggataatgtttatggggttgtttgggacgaggcgtgtggagtgtgggtgtgagcgtgcgtgtgtgatttttttttaggtttgtagagttgaggaaagaggttatagtaaagagggattgcggagggaggaaagtgagagatcggtagagggcgggagtggaggtgggcgcggtggggatgggagaggatgagtgaagagaaatttagaagaatggagtgagttagtgggagagggtgggagggttatagtcgggagcgaacgagttaggtttgttagttggggaaggtcgggacgttgggtttagtttagttgggatatcgcgttcgaggttaaggcgggtggattaggtatgttgagagtgtcggcgtataggtgggtacggttacgtattgatttagtgtttacgaagggtttgtattggataaggtttagacgtttatagagtttagaattttttttgttgtatttatatttaataagtttattttgggttacggatattttattttttaaaatgacgaggttaaggtttttggcgaggatggtattaaattgtacgggatagaagtgggggtgggggagagagttttttttaagtttatatttgtttttgtaaagtaaagagtatgtgaaattatagggtatatttttattcgaaaagtgtgttttatttttgaattttgattttttgattttttgatttgagtaaagatgtgtattttggtagtgagtagaatattttggttttgttttgtttttgagtggaaggattataaatataattcgtttggaggattaggtgtgaaggtttttgttaggtatatgggataatgtttttttaattttaagggtattttgttaatgtatgtttttggaaagtgtcggaatatagttattgtttttggattcggatttttttattaatattaatttttgtttgagagtaaaatttaggttcgttattaaaaagatatttttttggtttttaattgagaataaagttttttttaaaagttgtattgttttttttaaattaatatattaatattcgtaattttagaaatatatagtgattcgggagaatgtgtataaaatagatacgtttaaaaaagtttggcgtttaaaattaattttagttattatataggtgttgggttttttttatttttgggggttgtttggaatatgttatgtgtttttttgaattatttcgtgttttgaatttatttgagttagtagtaaaaataggtaaataaatttgtttaatttgttttgagtgttaaatttttttattttgaaatagttaatagtcgatagatggatttattttatggaaagggttagtttttttagttacgaagaaaattgattagagatttatattttaagttatttttaatttttacgtaatattcgtgaaaatttaaattttttttttttatttagtggaaatttaaagtagtgttatttaaggggagagaaatgagggggaaaatgtttacgtgttgtttaattgtattttttttttgattttgagaatttttatttttggtttttgaaatttcgtcgaggtaagaaaattaaatttttttaataagttttataattgaattttagttataggatatcggaaagtgtagttcgagaaagatatttttatttttgtttatcgacgatttttgtagtttttttatttttttgagtaatgggttaataattttttttttttttttttttattttgtagagattaagaggcgttcgtagtagaacggttttgtttttagttggtggcgaggataggtaattttatggaaaagttggaagagaatgagaaaattaaagatagaaagatttagagattcgcggagagatatagggagagggaagggagttgcgttgaaaagacgtaaagatacgcgcgtgtaattttttttttttttaggttttagaggtttgtaaattagggttgagaggaaggggttcgggaagtttacgtttttttcgttttttttttgtttggagtttcgttcgttagaggttggttaattttagtttcggtcgtcgtagatattgcgttgagtttttgggttttcgttttgtttagcgttagtgtagttgaagtgagtagttggtgggaaatgtaaatggtttttggagaaatagaagatatagaatgatttttatttttttttcgagtgtgtggaaggagttggatatacgttttacgtttttaattttttttttatatttttagttatatttttattaaataattaattaatgtttagaattattagggaatatattaggtatgtaatcgtagaagtagggtgttggggggttataaattatcgagttgatttaagacgtggattttaggttttttttttgttaaagtagtaaaggaagagcgggttttggcgattgtatttagatttcgattattttaaattagaagggggtggagggagcgtttaagtaaagtaagtaattttttgttttgtagatgtaaataagattgtagtattaaaggtattagtttttttagggttagatcgtttggattgggagtttggggaaggggagatattaattttacgtatttgtgaattttaaggatgttatatttttatataaataattttagtgcggattttttggaatggggggagtaatatttttattttagaatattaaaatattttttttttaaagcgtatattttttttatttttttaaaattttgaattatgtttaaagataatagttttttagtaaattggagtattggattattttttttatttttttttatcgatattttgatgatttgattttaatgtgtggggggtatagggaattaaatatagtttataaaattaagtttagatgaaatagtgttggttaagtgggtttagataatttttaatgagaattttaattatatttttttttttaatatgttgagataagtgatagaatcgttagaatggtaattaaattggaaagtttagggagaataataatttcgtgattaaattggggtaaaatcgtggataaatgtggggtgattttcgttaattttttgttatttaagagttaggatttgggaaaggtatagtattattttagagttcgttgtgacgggttgtgtgttattatttattttttttattttggattatgattttaattttggtaagtaatttttttagttttttatttgataataagcgagtatgtaaatattaatggttagcgatgtttaattgttttaaatattattgatttgttggttgttttaaattgtttttttagtttaggttttgttttcgaattgtttattttagaggtttgatttatgttttcgatgttataatataataattgtttttttaaaaaaggtatttaagatgaattaattgatttgtatataaattaaaattattatgcgttgtcgatttcggtgttttataattatttcgaaattagtatttaattatttgagttaaaagaatatataaatgtttgtattgatttattaatgaattatttaattaaaacgttcgggtaatgttgggcgttggaaagattgttaaattaagatatattataggagggatatgaagattagaaaggtaatagattaatatttcgtatttaaaacggagttttcggtgatttttagttttaattttggagtaggggttttttttttttgttgttaaaaagattttgtgtttgtttgtgagtgagtgtatttaagtggaaggaacgtttttacggttacggtggtttaggttttttgttcggatcgggattttatagttttaatttaggagcgttaaattttggaagatttcgggttagttttggaggtgcgtggtttcgtaagtcgttaggttaagtttgttttttttgtttgtttttcggtaggttgggcgcgttatggtagtgagtttttcgcgtaaacggagagttggaattaaagttgatatttaatagatatgttaattgagtatttattttcgttttgagaataggaataaaaggtagttttttttaagagaggcggtgtaaaggtacgttataggagtttagaaaaggttggcggcgggaaatttgtagtttgggggttagttaatatttttttttattttaagtatttattgatttgttgttgttatttttggcgacgcgaaggatattgaaagaatttcgatggggttcgatcgagaaggaggtgattgtttagttttattaattttaatatatatattgtttttttattttatcgatttttttttgttatttaatttatagtaattttattatgttttacgtatatttttcgtataaacgtgacgtattgttatattttacgtttggcgacgtagaaggatattgaaagaatttttgatgggttttgatttgagaaagaggtgatttgtttagtttttattaaatttaattattatattaattgttttttttattttttattcgatttttttttttttgtttatttttaattttttaattatttagaaatttttttattttttagtggttttttttttgtagtagttttttattcgaatttttttttcgttttttcgtggtagggtttgtatattgatttttttgatttttggtatatttgggttttttgaaattttttaatttttttagatttgaggatggta

SEQ ID NO: 129 - DNA, 8333 bp, Artificial Sequence
  chemically treated genomic DNA (Homo sapiens)
ttggattttttagagaagtagtgatgtttaaattgagaaatgaaggtttagagaggtaaagaaatttgtttaaggttatatggtatttgtttttgtggtagttttagaattaggatataaggttatttaaggatttttttgtagattatattaaatttagaggttttttagagagggattgttgtttatggttatataaagggtaaggtttttttgggtttttatttttttttagtttttacgtgcgatgttgaattatagttttatggtttattttttttttattgtattattttttatggaaaatgaggtttgaatttttattatgtattattagttgggttaagttgggtgtttttatttttaatttattttaatttaaagagaagataatttggtaaagatatttgcgtgtattttaaagttagtgtttagattttaggatttaggagtttgggatttgtttttattttttattggtttttagtatgattttagataagtttaagttttagtttttttttttgattaatgtgaatgaatggtttttgtttagtttattatataaaggggtaataatatttagggaaaggggatagaggataggtaaatttatttattaatgttaaagtttttagtgtggtttaattattttgggggttgatttagttagttttatttttagggtaaattagttagaaatggggaaggtgattaatagtagtaagaattttaggaaattgatgaggttatgatagaggtaggagggttagttttggggtatatttgtaggtgagagtagaggtggttaattggatttgtacgatagttgttaagcggagtgaatttgggtaagtgtattttacgtttatttttttttcgagaggtttttttttttttagggtttttaatttggttttttgtttaatattttcgtatttttgggtagttgtaagttagggtttgttttttttttttatatattaatatttatttgttttaagtttaataatttttataaggttttattttttgttaggtaatagttatttaattttagaatttagttcgcgtgatgatgttttttttattggattgagtaggggttaattttttcgtttaatttatattgtttatttatatttggtatggagttaggagtatttgggtatttgtaaatatgtattgaatattgttggtaaaatatattttttttatattattagttttagaagtgtgttttttaggagtttttatgaagatgatgttttagtttatagggataaattataaatagtttattaacgggagttatagatgaggaattagattattattttttattttatatttaattttaatgttttaatgattattaaaaaatgtttattttacgagatggcgttattgtattttagtttgggggatagagcgagattttattttaaaaaaataataaataataaaaaataaaaataaaaaaaaattttgtttattttaatttaagaaaattgttaggggtcggggttaggggtagggttagaaagatgaggtttatttaagttaaatgttttggtttttggagatttaggagtttaagttgggagtaaagtcgagatagttttagaatttgggatgaggttatttgtcgttttttttttaattttggataggaagtagtcgggagttttgttttatttttttaggaagttttgttttttgggttaagttttagagtattgaggttttattttgtgtttggttttgatttattaggttttttaagagatttttggatagggagagtttttaggataggaaggttagggagggattaaatttaaggttaggcggttaggttgaatagcgtgggatttggtttgtaggttaaaggagttatagaagattttgagggtaagatagaagtagggtagatttaataggtagttgaggatttgttattttggtttgtatatttaggagatgtttagttttcgggtttttagaggtgttttttagggcgaaaatttttttatttttttgtagtaggtgtttttagggtgttggtggttttttttgtttagatttcggttttttttatgcgaaatagaaatttgaaacgtttttttaggtttaaagggttgataagagtcgaggataaatgtggtgaggtgaggttttggaagataggagtaacgttggttggttttggggttaaagttttatgattttagggagggcggatcggcgttagtattaggcgtcgggtttagttttttttttatatcgtattttttttttagttttttttcgtagggtgcgacggtatcgggtcggtcgatttttcggaggtagagattcgggtttgggggttgtcggtcggtttttttcggtttcgtcgtgttaggcggttatttatcggtttttgtttttacgtcgtttcgtttcggggataagtagtttttttgcgagtttagaaagtcgaagttcgattgttggaagcggttaaaattatttaggggtagcgttcggtatttagatttgtcgagtatggtttttgataggagatacgtttcgcgttttcgcgcggcgttttttttggttagtgggttttacgcggtttcgtttttttggttgttgttttcggttttattcgcgcggttattcgcggcggcgcgggcgtaggaagaggaggtcggtcggggttcgttttcgtcgtcgtatggttttttttgcgttgggaggatcgaattgtagtttagggttattgggtgtgatcggcgtttttcggatttcgttggggttatcgtttttttttttttttttttatttagttttagaaaagttggaggggaagttgggtacggtggtttatttttataatttattaatttgggagatttaggtaggaggatcgtttgaggttaggaatttaggattattttgagtaatatagtgagagtttatttttataaaaaatttttaaaaattagtttggcgtgggatgtttgtttgtggttttagttatttgggaggttgaggcgggaggattttttgagtttaggagtttgaggttgtagtgagttatgatcgtgttattgtattgtagtcggagcgagagagtaagattttattagggtttataggaagttaattttttttaggattaaggatatgttatattagtttttttagtatttttttttttatattggaggtaggatatgttatatttggattttgggtttttttgggatatagtttgtaaattatttttttttgtgaatttatagtttagtaagtagggattggtatagggtaggttttaatatttatttgttaagtaatggtttggttaggttatcgtgattaaggtggagtaggaaggtttgaattttggtataaaaagaaagaagttttatatgtagatttcggggagtatgggagtgtaaggaagaaggggatagtatagagttatatgagggtaggggttttagagtattatagaggtgaggtttttagttttgtaggtttagaaagagtatgttttttgatttaggtatttggaattaatttgtttttttagggtttgagaaaatttgaatgtaattcgtgaattttttttgagaagtgttaatttttaataggattttggggtagtttgggagtaggttattttttaaagtaagtaaagaaatgaataaagtttttttagttttgtttttttagttaatcgtttttggttttcgaagttttattttgttatagtttatttttaggttttttgtgtagatggttgtttattatatttggtttttatggattgattttttaaaggtttgggagtattgattaggttggagggaagggtaggtttttgaggttttatagtttttaggaagttgcgtatttgtttaatttttgttttttattttgtagattgtaaggtttataagagttaggttttattattattttttttagtttgtttttaagttggaatagagtacggaatgggtatataggagttagtatagtggttgcgatggtttaagtttgaagtcggggcgttgatttagtgaggttatttggaattgtgtttttttttttttattagttgggagtttgatatgtttttttattggcgaagatttagttggttttttttttattttttttatattcgttttttagtttttttttttttttttgtttttattattttagatttattagtttttttagttgttatttaaggtattattttgtttttttatttttagttattggttttttaggatttttgaattaagttttttttttgtattttatagttattgttttagattagggtatttgtttttaggttgttagagtgattgttttattatgtatagttgatcgtgttgttttttggttttaaattttttagtaattttttattatttatagaattggtttaatttttttagttaggattttgttttagtatattttttgggtattattttttatgaatttttttttaaatttgaaaatggttaaaattagtttttaaataggtttttgtaagagttattttttttgttttaagtgtttttcgtattttattatttataattttaaatttttggtgaatttttattgtttttgtaggttttagttgtgggtttttttttttagaatgttttcgtttgtaggtttgtttttttattatatttacggtttttagaaagtaggggttgcgtgtggtttatttttgtacgtttagttttcggtaggacgtggtacgaagtagtgttagtgtgaacggatgaatggattaaagtcgggagtagggttgtttttttgtagttttgttttatttttttcgttttatcgtaagttagcggtaggtttgtagtttttcgtttttatttttttttcgttttgggcgtgtttttaaaatttatagtcggtttttttgttttttagaatcgtttttagtttttgttttattttttttttagaggcgggttttgagtcggtattttttttttcggatagtttaagggatttagttaattggtttacgttttttttttagtttttttttacgtattttaagatttaaatcgagaatcgaaattaagttggggtttatggagtttgtattcgttcgattttcgaggttttagtaggatttcgttcggttttaggagtttattatgttttttttcgagattttttttgaaggtcgttagtttagttttagttttagttttatagaggtattattgggttaggggatgatggggttaagttttgttggtttgttgtggtggggagaggcgggaagagagggtttaacggaggatttggttaagtattttagagagtgatataaagcgggaagtttagatattagggttttgatcgtttcgggtggggtagggaagggagggtaggatagagtagaaaagaggatacggaggagttggggcggtttcgttgggttgcggtttttttattgagtagttgggtaaggtgagaagggttagtggttttcgggtttgggttttttcgtttattttcgagttttgttttaattttgttttagatgtaggattttagattagggaggatggaggtagtatttttgttgcgttggtttggagttaggggtatgttttaggtacggtaaaattaaaattaattttttagattcgaggtgagaaattggtttagattgaagaggtatttttgttaaggttttttagtttatgtggtttttgtttaaggaagtttttttaacgaattttttttttgttatattttttttgtttattttttatttttttcgataaaggaattatttgggttttttgttttgttgttttttaggtttttttatttttttttatgaaagtatagaggatatcgtattatagtaatttttataaatattattataattaagaataatattatttaataatattaggtaatatttatgagtattttaaatgtgttaggtattgtattaagtattttggtttttttttgttgttgtttgtttgttttgttttgttttttgtttgtttgtttatttgtttgtttttgagacggagttttatattgtcgtttaggttggagtgtaatggtgcgatttcggtttattgtaatttttttttttcgggtttacgttatttttttgttttagtttttcgagtagttgggattataggttacgttattatatttggttattttttatatttttagtagagatggggttttattatgttggttagattggtttttaatttttgatttcgtgatttatttatttcggttttttaaagtgttgggattataggtatgagttattatgttcggtttgtttttgtattttataaaatgtggtaaaatatatttaatggataagtttttatgttaattatttataagtgtattatttagtggtattaagtagatttataatattgtgtaattattattattatttatttttagaatttttttattattttagaaattttgtattttttaaattataggggagggaaagatggtttgtttttatttttttagtttttttggttgggttatgaattaaatagtttatgaattaaatagttataaaatagattattagcggaaaatttatatttaattatatatgtatatttaggagttttataatatatgagatttaaagaaaggttagatgattgaagtttgtataatattttgagttacggaaaagagtttggagtttttgggtgatggtgataatataagttatgggagggtgaggagaggagttgtttggtgaatagaggttgttttgttatgtagattaaaagtttttagataataaaagttgtttggagtagtttttttttaatatagattattttattaatgtagatttttttttaagatataaatgttttttttttttataaaaggagagttttttagagttatttttgtattagtagttttttagaataattagtttaaaatatgttaaagaagtatattttaagagttttttgtagttatattttgaagtggtgtgttttgagttttagtaatgtaatagttttttatttttttttttttttagtttttggtaatttttaatttattttttgtttttatgaatttatttattttagatattttatgtaagtggaattgttattagtagaggattttgattgtaaattgtttaggtttttggtattttgaataaagaattggataaaatgtatagtaaagtaaggaaagagtgaagtaatgaaagtagagatttattgaaaatgaaagtatattttatagggtgggagcggttagagtagggtttaaggattttagttatagaattttttgggttttaaatattttttagaggttttttattggttatttggtgtttattttattggttgtagaaagtaattaattagacgtatttttaattttttatttgttttgtaggaaatggggtgatttgtaaagagagtagttttttttttttttgttattgaggtatggagagttgcggtttttttttcgatttagttttaggaagttagagggaatcggttttaggttttttgtttttagattttatttttttgttttagaattatatagtgtttgattttttgtgattggtttattttatttagtataatgttattgaggtttatttatgttgtagtatgtattagaattttatttttttttaacgttgagtaatattttattatatgtgtagattatattttgtttatttatttatttgttgatggatatttggattgtttttatattttgtttattgtgaatagtgttgttgtggatattgttgtataagtatttgtttgggttttgtttttatattttttggttatatatttaagagtggaatttttgggttatattgttgttttatgtttatttttttaatgaatttttaaattgtgtattaagtattttatatgaggttggtatttagtgtatttattttttaaattgagttttttgaaggtagaatgtattttatattttttatattttagagtttattattgtgggtgatgagaagtagatgtttaataaatggtgtagtgagagttggagggtttgaataaatgggggtattggggtgttgataagttagggttttgtattatttaatgattggttggaatggaatatgaggttttattttagggtttagttgtaagggtggttggtcggtaggtgggggtttttgggatttttttaggttttatttgtttttttggttttttagt

SEQ ID NO: 130 - DNA, 8333 bp, Artificial Sequence
  chemically treated genomic DNA (Homo sapiens)
gttgggggattagagaggtaggtgaggtttggagaagttttaaaagtttttatttatcggttaattatttttatagttggattttggagtaggattttatattttattttagttagttattggatgatgtaaaattttggtttattagtattttaatatttttatttatttaggttttttagtttttattgtattatttattgagtatttattttttattatttatagtaataggttttgagatataagaggtgtaggatatattttgtttttaaggaatttagtttggaaggtagatatattaagtattaattttatataaagtgtttaatgtatagtttgggggtttattaaagaggtaagtatggaataataatatgatttagaaattttatttttagatatataattaaaagatgtaaaaataaggtttaaatagatatttgtataataatgtttatagtaatattatttataatagataaaatgtagaaataatttaagtatttattaatagatgaatagataaataaaatgtggtttatatatataatggaatattatttagcgttagaaagaaatgaaattttgatatatgttataatatagatagattttaatgatattatgttaagtgaaataagttagttataaaaggttaaatattgtatgattttgaggtaggagaatagggtttggaggtagggaatttaaggtcgattttttttgattttttagaattaaatcgaaaggaaaatcgtaattttttatgttttagtaataaaaggaagagaggttattttttttgtaaattattttattttttgtagggtagatggaaaattgaaagtacgtttggttggttgttttttgtaattaatggggtgaatattaagtggttaatgggaaatttttagggggtatttggaatttagaagattttgtaattggggtttttgagttttgttttagtcgtttttattttgtggggtgtatttttatttttaataaatttttgtttttattgttttattttttttttgttttgttgtatattttgtttaattttttgtttaaaatgttaagaatttgaataatttgtagttaagattttttattggtaataattttatttatatgaaatatttagaataagtaagtttatagggatagaaggtagattagaagttattaagggttaggggaaggagaaaatgaggagttattgtattattggggtttaggatatattattttaaagtatgattgtaggaggtttttgaaatatatttttttggtatattttaagttggttattttgagaaattgttgatataggaatagttttgaaaagttttttttttgtaaaaaagaaaggtatttatattttaaaagaaaatttatattagtaaaatgatttatattaaaagagggttgttttagataatttttattatttaagaatttttaatttatatagtaagataatttttatttattaaatagtttttttttttatttttttataatttgtgttattattattatttagaagttttaagttttttttcgtagtttaggatgttatataggttttaattatttgatttttttttgagttttatatattgtgggatttttgagtatatatatgtaattaaatatgggtttttcgttggtaatttattttatgattatttaatttataggttatttaatttatagtttagttaaggaaattagaagggtggaggtaagttattttttttttttttatggtttaaagagtatagagtttttggagtaatgaaaaagttttggaaatagatggtggtgatggttatataatattgtgaatttatttaatgttattgaatggtatatttataaatggttaatataggaatttatttattaggtatattttattatattttgtaaaatataaaaataggtcgggtatggtggtttatgtttgtaattttagtattttgggaggtcgaggtgggtggattacgaggttaggagttagagattaatttggttaatatagtgaaattttatttttattaaaaatataaaaaatagttaggtatggtggcgtggtttgtaattttagttattcgggaggttgaggtaggagaatggcgtgaattcggaaggaggaggttgtagtgagtcgagatcgtattattgtattttagtttgggcgatagtgtgagatttcgttttaaaaataaatagataaataaataaataaaaaataaagtaaaataaataaataataataaaaaaaaattaaagtgtttaatatagtatttggtatatttgaagtgtttataaatgttatttagtattgttaagtaatgttatttttagttgtaataatgtttataaaagttattgtaatacggtgttttttgtatttttatgaaggggagtaaaagggtttgaaaggtagtagagtaagaaatttaagtagtttttttgtcgggggaggtgggaggtgggtaggaaaggtgtggtaagagaagggttcgttggggaggtttttttaagtagaaattatatgagttgggaggttttggtaaagatatttttttagtttgagttagttttttatttcggatttgggaagttggttttagttttgtcgtgtttgggatatgtttttggttttaggttagcgtaataggggtattatttttattttttttaatttgaagttttgtatttgaggtaaagttgaggtagggttcgagggtgggcggaagggtttaggttcggaggttattgattttttttattttgtttaattgtttagtggagaaatcgtagtttagcgaggtcgttttaattttttcgtgtttttttttttattttattttatttttttttttttgttttattcgagacggttaggattttggtgtttggatttttcgttttgtgttattttttagggtatttgattaaatttttcgttagatttttttttttcgtttttttttattatagtaaattaataaagtttaattttattattttttaatttaatagtatttttgtagggttggggttggggttgggttggcggtttttagagggggtttcggggggaggtatggtgggtttttggggtcgggcggggttttgttggggtttcggagatcgggcgggtgtaggttttatggattttagtttagtttcgattttcggtttagattttggagtgcgtgaagagaagttgaaggggaggcgtgagttagttggttgagttttttgagttgttcgaaaggggaggtgtcggtttagggttcgtttttggagaggaagtgagatagaagttgggggcggttttagggggtagagaggtcgattgtgggttttaaagatacgtttagagcggggaggaggtagaggcggagagttgtagatttatcgttgatttacggtaaagcgggagaggtagggtagagttgtaggggggtagttttgttttcggttttgatttatttattcgtttatattggtattgtttcgtgttacgttttgtcgggagttgggcgtataaagatgagttatacgtagtttttgttttttaagagtcgtagatgtaatggaagagtaagtttgtaaacggagatattttggaaaggagagtttatagttgggatttgtaaaagtagtggaaatttattagggatttagggttgtaggtggtggggtacgggggatatttgaaatagaaaagatagtttttgtaaaagtttgtttgggaattaattttggttatttttagatttaagagggaatttatgagaaatgatatttaaggagtgtgttaggataagattttagttgaggagattgaattagttttgtgagtgatgggaagttgttgaaggatttggaattagggaataatacgattagttgtgtatgatgggatagttattttgataatttaggagtaggtgttttggtttaggatagtggttgtgggatgtagaggagggatttgatttagagattttgggaagttagtgattggaggtgagggagtaggatgatgttttgagtgatagttggaaaggttggtggatttgaggtggtgggggtaggagggagggggagagttggagagcgggtatgaagagggtgaggggagagttagttaggttttcgttaatggaaaagtatgttagatttttagttggtaaggggaaaggggtatagttttaggtgattttattgggttagcgtttcggttttaaatttaaattatcgtaattattgtgttggtttttgtgtatttatttcgtattttgttttaatttagaaatagattagaaaggatgatgatagggtttggtttttgtaaattttatagtttgtagggtggagagtaggggttgggtagatacgtaattttttagggattgtaaggttttaggagtttgtttttttttttagtttggttagtatttttaggtttttagagaattagtttatgaaagttaaatatggtgggtagttatttgtataagggatttggaagtgggttatggtaggatggggtttcggaggttagaggcgattggttgaggaggtagagttggggaagttttatttatttttttgtttgttttggaagatagtttgtttttagattattttaaagttttgttggaagttaatattttttaaaggaaatttacgagttgtatttaggtttttttaagttttggagaggtaagttaattttaggtatttggattaaggggtatgttttttttggatttgtaggattgagggttttatttttgtggtgttttggggtttttgtttttatgtagttttgtgttattttttttttttttatatttttatgtttttcgaagtttgtatgtgaaatttttttttttttgtgttaaagtttaggtttttttattttattttgattacggtgatttggttaggttattatttaataaataagtattgagatttgttttatgttagtttttgtttgttgggttgtgggtttataaagaggaataatttgtagattatgttttagagaaatttaaagtttagatatggtatgttttgtttttagtgtgagagaaagagtgttgagaaggttgatatagtatgtttttgattttggagaagattggttttttgtaaattttgatgagattttgttttttcgtttcgattgtagtgtagtggtacgattatagtttattgtagttttaaatttttggatttaagagattttttcgttttagttttttaagtggttgggattataggtaggtattttacgttaggttaatttttaaaaattttttgtagagatgggtttttattatgttgtttaggatggttttgaatttttggttttaagcgatttttttgtttgagttttttaaattgatggattataggagtgagttatcgtgtttagttttttttttagtttttttagggttgagtaggagaagaggggaggaggcgatgattttagcggggttcgaggaacgtcgattatatttagtagttttgggttgtagttcggtttttttagcgtagggggagttatgcgacggcggaagcgggtttcggtcggttttttttttttgcgttcgcgtcgtcgcgggtggtcgcgcgggtgaagtcggaagtagtagttaggagggcggggtcgcgtagggtttattggttagggagggcgtcgcgcggaggcgcggggcgtgttttttgttaaaagttatgttcggtaggtttgggtatcgggcgttgtttttgggtgattttgatcgtttttagtagtcgagtttcggttttttgggttcgtagaagggttgtttgttttcggagcggggcggcgtggggataggggtcggtgagtggtcgtttggtacggcggagtcgggggggatcggtcggtaatttttaggttcgaatttttgttttcgaggagtcggtcggttcggtgtcgtcgtattttacgaggggggattgagaaagggatacgatgtggagagggggttggattcggcgtttggtgttagcgtcgattcgttttttttagggttatggggttttggttttagagttagttagcgttgtttttattttttaaaattttattttattatatttgttttcggtttttattagttttttaggtttgggaagacgttttaggtttttatttcgtatagaagaaatcgaggtttaggtagaggaggttattagtattttaaaggtatttgttgtagggaaatggaagaattttcgttttagggggtatttttagaagttcgggaattaggtattttttggatgtgtaggttaaaatgataggtttttagttgtttgttggatttgttttgtttttgttttgtttttaaagttttttgtggtttttttggtttataggttagattttacgttgtttagtttaatcgtttaattttggatttgatttttttttggtttttttgttttgaaagttttttttatttagaagttttttgagaggtttggtggattagagttaggtataaagtggagttttagtgttttggggtttagtttagagggtagggttttttggaagaatggagtagggttttcgattgttttttgtttagggttgggaggaaagcggtaaataattttattttagattttggagttgtttcggttttgtttttaatttgggtttttgaatttttaggggttaggatatttggtttggataagttttatttttttagttttgtttttgatttcgatttttaataatttttttgaattgaaataggtagggtttttttttgtttttgttttttgttgtttgttgtttttttgagatggagtttcgttttgttttttaggttggagtgtagtggcgttatttcgtgaaataggtattttttaatggttattaaggtattaaagttgggtgtggaatagaaaataataatttaattttttatttgtggttttcgttgataagttatttatgatttatttttgtaggttaaggtattatttttataaggatttttggaaagtatatttttggggttgatggtataggaggaatgtgttttgttagtagtatttagtgtatgtttatagatgtttaggtgtttttggttttatgttaggtatgggtaggtaatataaattaaacgagaggattgatttttatttagtttagtgaggagagtattattacgcggattggattttgagattgaatggttgttgtttagtagagaataaggttttgtgagggttgttggatttgggataaatgagtgttgatgtatgggaggagggaatagattttaatttgtagttgtttaaagatacgggaatattaggtaaggagttagattgagagttttgagaaggaaggagtttttcgaggggaaggtgggcgtaaggtatatttgtttaagtttatttcgtttggtagttgtcgtgtaggtttagttgattatttttgtttttatttgtagatgtattttagagttggtttttttgtttttgttatggttttattagttttttggggtttttgttgttgttggttattttttttatttttggttggtttgttttgaaggtaaggttggttgggttagtttttagggtggttgggttatattgagagttttggtattgatgaataaatttgtttattttttgttttttttttttaaatattattatttttttgtgtaatgggttaggtaagaattatttatttatattggttaggggaggaaattaaggtttgggtttgtttaaagttatattgggagttagtagggggtagaagtaagttttaaatttttaagttttgggatttggatattggttttaaggtatacgtagatgtttttgttaaattattttttttttgggttagaataaattagaaatgaaaatatttaatttagtttagttggtagtgtataataggaatttaggttttattttttataaggggtggtatagtgggaaaaggatgaattatggagttatagtttagtatcgtacgtgaaagttgggggaaggtggaagtttaaggaggttttgttttttgtgtagttataggtaatagtttttttttagaaaatttttgggtttggtgtggtttgtaagggggtttttaaatggttttatattttagttttaaaattgttatagaaataaatgttatgtgattttgaataggtttttttgtttttttgggtttttattttttaatttggatattattatttttttaggaggtttag

SEQ ID NO: 131 - DNA, 8170 bp, Artificial Sequence
  chemically treated genomic DNA (Homo sapiens)
atatttatatagattttttttatataatagaggatagtattaggtagtttgtttaggttttaagtggtttatattattatattagttttattatttattgaatgatttttggtaagaatttattttagttttttagttagtaaattagtgtttatattattaggttaatgtgaaaataaaatgagataatatatataaagtatatagattaattatgtataaataatagttaaaaagttttgtaattagtaattgttaatatttattgaaagtttattatatgttaagtattgttgtaagtgggtttaatattattattatttttatattatagataaaataatttaaaatattaaagggtaaaattatttgtttattaatgtatagttattaaggtataaagtttgggtttatagttagatagtttaattatagaatttatttttatgttgaatatatatattgtttttgaatttataaaaaaaaagtagaaaaattagaaaatataaatatgaaaaatagaggaaaagaggttttaattttatatataatttagagataattagatttgaatattaatttttaatagaatttttttttggggttatatattttttttttttttttttttttttttttttttttgagatagagttttgttttgtcgtttaggttggagtgtaagggcgttatttcggtttattgtaattttcgtttttcgagtttaagcgattttttaggttttagttttttaagtagttggaattatagttcgttattacgtttggttaatttttgaatttttagtagagacggggttttgttatgttggttaggttggtttcgattttttgattttaggtgattcgttcgtttcggttttttaaagtgttgggattataggtatgagttatcgcgtttagttatttttttaaaattatattttaagttttgggatatatgtgtagaacgtgtaggtttgttaaataggtatatatttattatggtggtttgtcgtatttattaattcgttatttatattagatattttttttaatgttatttttttattagtttttatttttagataggtttcggtatatgaggtttttttttttgtgtttatgtgtttttattgtttagtttttatttaggagtgagagtatgcggtttttggttttttgtttttgcgttagtttgttgagaacgatgggtttttagttttatttatatttttgtaaaggatattaatttatttttttttacggttggatagtattttatggtgtatatgtgttatttatttttaatttagtttattattggtgggtatttgggttggttttaagtttttgttattgtgaatagtattgtaataaatatatatgtgtatgtgtttttatattagtatgataggattttttttggggttatatatattttttttaagatgtggttttttttgaaatttagagtatttaaaaaaaattaattttttgtttaatttaagaggaaatacggtgaataaattaggttaaaaatatttggcgaagattttttttttgtatatttttttttattattttagattgaagtagaattttttttttatttatttggtagtttttaaattgagttataatttttattattatttaagtgattataaatgagttttagaaatatatagaatatggtagtttaaaatgttaatagaaaattttttaaggtgttaaaataataaaataaaagtaaaaataaataaataagtttttggataaggttaaattttaaagtttgaaattattaaaaatgtatgtaaaaaatgaattatatgtttagtttttatataaaatattatgtatattaaggtttagtataaatttaaaagatgagatattaagaaaattttaattatataatgattagagtaatgaaaattaaaatttttagtgtatttgtaaaagatataaatggataataaaattgaatggtttttaaataaaaggataaaatatagaatttgttaattaataaaacgataaatatagatagtaaatataaatttgaaaatagagtatattagtaattaaaaatgtagattaaaatattaaaatattattttattagattaataaggtatatatatttatatattattattaataatgagaatgttagataattgtggattttatattattaatgttagtgtaagatggtataagagtattagttatattttaatgtttttttttaagataatgttttatggcgggggtggttataaatatttgaatgtatttaggattattttatttatttataagtgtggattattgggaattatttttatatttttggaatttattaaaaagttatagttaataagagtatttttttcggtttagcgtatgggttatatttgtaattttagtattttgggaggtcgaggcggggtggattttttgaggttaggagttcgagattagtttggttaatatggtgaaattttatttgtataaaaaatataaaaattagttaggtatggtggtaagcgttttgtaattttagttatttggaaggttgaggtaaaagaattttttgaatatgggaggtagagtttgtagtgagttaagattacgttattgtattttagtttgggtgatagagtgagattttttaaaaaaaaaaaaaaaattattataaatgtcgattgagaagttataagatagtttgtttgtttttttgaaagtttaagatatgatttagagatttttgaggtgaatatggatggagaattagtttaggttgttttatagagaaggaaaaaagtgtgagataaaaaaaaaaaaaaaaagtaggtaggagagttagagaggtgtgtttttattttttatttagtttgtttttatggtttgattttttttttttttgtgagtgttaagaaatttttgtgttttttgataataaataattttttttgtttgatttatttttgatattttatattaaaattataatataattaattatttgaaaatgtaagttagtaatgtttttaagatgttaaaagtttgtaagatttaagtttagtaattttatttttaagaatttattttaaaggggtatattttaaataattttatagatatattgtatcgtagaagattgtaatggaaatatttattttttggttttattttattttaatagaataggtgtttaatttttaaaaatgattatggaagaaattttacgattgtaatttaaaattttttagatattatggtaaataattgggaaaattttatattgtttgttaggtaggttttatggtattttataaagtatttttagtatattttataaagtatattttttatatattttattaatatattttaatgattttatataataatagtaaaattattaagggatatttttaaattatattttttataaatattatttagtttaatttttaatatatatgatatttaataaatatatttttatttaatttttttaatagaaattttaaatagatatattgaaaattatttttttgtatatgtgaagtttgaaaatgattagaattttgtaagggtataataatgtttttgattatttgaaatttttttttattagaaaagattaataaagttttaaagatatagaatttagaatgaaaaaatatgttatttttagaataaatatttttattttatatttaatgatttaggtaagtttttatatatttttttttaaaatattagttgtttattgataaagtgtttaagtttttgaaaatgttttattaatattaatatgaaatttgatataaagtaattaattttaaattattttaaaatatttcgtagtataaaattagtgtttatttatattaataatatttatttttgttcgtttatttttatttgttatattattttaatatataatatataaatagtattttatttatttattatatatttataaattatgattattgtaaagttttgatgttgttatttatttttgaaatagttggttgtagtatattattttttttatttttatataaagttaatatattttgtgtgagaagtttgtatttagttagtaattattatggttattttaggttttgtggtatagagtttagtttagtgagaatggtaaggtatataatttatatagatgttgtgagatttgtatgacgtaattgtataaatatttagaatattgttagtatttagtaatagtttattaaatattgggtttttgagtgaattgaaatcgaggtaaagataataattatttatattttagttgtatttaattttggtgtagtagtggttgcggtttttgttattaatgtaattatttttgtattaatttattattattatattttatttaatttttttttattttttatttataatatagtaaaatttatattggttgttatcgtttttaaaagttgtgtatttttgagtatgaattattaattgataatatatttttttatgtttagtattatatgttttttttataattttaaatattgttttttaaaattatgtataatattatgtattttttttgttttatgttttatcgtagatttaatgagaagttgtttaaaaaaattttatatttatatatttgtaattgtgttagtagtaaaaagatatttattattttttaattgattgtggtattatttttttgagggacgtgtttttaaaattgttgatttttttttaaaaggtttgaattattgaagttgttaaataaggttttagatttttttttttttttttatttatattttagaattagtttttttttttgttatggattatgtttggggtaaaaaaggaagacggtttagattgataaagtaatatttttgggaaaagattattaatatgtataaagggatttttttgtagtataaatattagcgtgtatttttttggtgttttagagtttttttgatgtatatatgtaggtagtgagaattgaatcggttttttgagatagtaatataataaaattttgatttggggagtagcggttttttttatttttttatttttttgtgggaatgagttgttaagtttttatttcggttgatatttttatatttttgaattttgacgtttttgtaattttgtttttgataatgtattatagtgttgtcgagtgtttattagtttttaattatgttattaatgtgatgtttataggtattgatttttatgatagtttatatatgatcgggtttaaatattttagaatgaatgttttgaattttgatagttaataatttttttgtattttttattttatttttttaatttaatttgttttaagtgaagtaagtattaagtatatttaaaaagttaatatgttaaataaattttaaagaaatattagtaagtgtagtaatttaaaattattgttggttttgttgtaaggaagaaaatttgttttttatataagaaaagaatgaatttggatattttaaatttaaaaatttttttaatggaaatatttatagaataaggagtaaatgaaatgaatattataaaataataatatttaaaaggtgttatttttttattttaaaggtttattcggttgttaaattatatttattatttaaaaatagttataaattttatattaaatataatagaataatttgaatattaataataatggattttatagaataaaatagagttttaattaatatattttagtataagatatagaaattatagtaagaaataatatgatatttaaagtttattaattaaggtaaatttttttaaaattgtattttgaagagatttattttatttttaagttttaatatttattttatataattttttagaataaaaattaaatttaagaatttataggtttaatataattagttaaatatatatgttttgttagtgtgtttattttttatgtagtaataaagtgttttagagttgatttataaatggagaaagatttgaattgggtaaattttttttattgaatagtaatataatatttattttttatttgttttaaatgtaattttttttatatttaggaatgaaattatatatatttagaaattaaagtttgagttgatatattattttgatttgaaggatttaagttttattttttattattattaagtattttttaaatatatgcgtaagtttggtattaattttttggtggattttaaagaatttagaggttagatatttagattttggtaaaattatttaatgtagagattttttaatattattttttaaattaaattttaggaattcgttaaagatttttgtaatttaatttaaagggtaatataggaagtattttttaatataatttttggaagatataatagtttttattaaaaatatatgttataaataaatttaagtaattattatatagttaattatatattttaaatagtaggttattttatagattgagaataatgagaataatatattatttttgtgtttgaagataatttggttagtatgaaaatataatttagaatcgaggtaataatttagtaaaatttaattttatatttaaaatgttatttatttattttaaaataagtaataatttatttagtaaattagtttattttgtatttaattttttaaaatttgaaaagtaaaaattatttaagttttaaaattaaaaaagaattataattaataaaagtgatttataaatgttttaaatgataatagtattgatttataattttttaatgaaatttgaattatatatatttaattgtttaaggaattattatagaaatattgattttaatgggaatatttgagtattaaatgtgtttaatgataatttgtttaattttggaatgtatagtaatgtattatatgtaattattatattgtaaaatgattttagtttttttgagttattaattataaaataaaaatgtatatagatttttaaaaattaaagatttttttttattttaaaataatttattttattttatgaagaaaggtatgtttttaattattagtttgtatattggtatttttaaaggattttaatcgtattttataatattttatttatttaagaaaattaatttatgaaaattaattaatatatttagaatatgaaggaaaaaattgagaaaataaaatatataaggaaatattggttttattgttaatattttgtgttttttattaatttgatgatttgtgtttaaaatttgataaaagtttaataattttagtttatttttaaaatatatattgattttttgaagtatataattatttatgaacggttatgtttatgtaaggttttatggttttatggatattaagttatttaatgaatgaatttattttttgattagttttattattagaatggttgtattaattgtgtatatgtagataattaataattttatggttttaatattaaaataaatagattatatattgttataggtttttaatagtattttgaatgtagtgagatttttatgattgtatttaataaaaggttatttgttttgttatttttattttgatgaaataaatttgttagataaataagtaaaaatatattgtttaagagtgaatttttgtatttatttatatagattgttttataatattatgtaatataagaattttaaaggattatttttttagtcggcgagttgtaatgtttgtattgaatagaattaataagtattttgtaatttttaaagggttaaggtttaaattggttagttatttttttacggggtattcgtagttatagtatagagtataggataattaatgaagttcgttttgatgatttattatttcgttatatgagataaattttgattttttttagttttaatttattcgttagagaatttatttaaaatgagaaaaatatattggtatgtaattttaagaattatataaatgtgtatttttgaaataaaacgaatgtgttttgaatttttatatatttttttattagttttatttattttgtttttgatttaaatttttaaatgtttgtgtatatatttttcggtgataacgttgggaaatatagt

SEQ ID NO: 132 - DNA, 8170 bp, Artificial Sequence
  chemically treated genomic DNA (Homo sapiens)
gttgtgttttttaacgttgttatcgagaaatgtgtgtataaatatttaggagtttggattaaagataaaatagatgggattggtaagaaaatgtataaggatttaagatatattcgttttattttaaaaatatatatttatgtggtttttaaagttatatgttaatatgttttttttattttgggtaagttttttgacgagtaggttaaaattaggggggattaaagtttgttttatgtaacgagataataaattattaaaacggattttattaattattttgtgttttgtgttatggttacgagtgtttcgtgaaggggtgattgattaatttagattttggttttttgggagttgtagaatgtttgttggttttgtttaatgtagatattgtaattcgtcgattagaagaatagttttttaaaatttttgtgttgtatggtattataaagtagtttgtatgaatgaatatagaaatttatttttgaatagtgtatttttgtttatttgtttaataaatttgttttattaaagtggaaatggtagagtaagtagttttttattagatataattataaaaattttattgtatttagagtgttattaaaaatttgtaataatatatgatttatttattttgatgttgaaattatgaggttgttagttgtttgtatatatataattgatataattattttaatgataaagttggttaaaaaatgagtttatttattgagtgatttaatatttataaagttataaagttttatataaatataatcgtttataaatggttatatgttttaggaaattaatgtgtattttggaagtaaattggaattattagatttttattaagttttaaatataaattattaagttgatagggagtataaaatattgataataaaattaatatttttttatatattttatttttttaatttttttttttatattttgaatatattggttaatttttataaattaatttttttgaataaatgagatattataaagtacggttagaattttttgagaatattaatatataaattagtgattaaagatatgtttttttttataaagtaaaataaattattttaaaatagagaaaaatttttaatttttaaaaatttgtatatatttttattttataattaatagtttaaaagaattaaagttattttgtaatataatgattatatataatgtattattgtgtattttaaaattaagtaaattattattaaatatatttaatatttaagtgtttttattaaagttagtgtttttataatagttttttagataattagatgtatatgatttaaattttattaaaaaattataaattaatgttattattatttaaaatatttgtaggttatttttattaattataatttttttttaattttaaggtttaaataatttttgttttttagattttaggaagttaaatataggataggttaatttattaaataaattgttatttattttaaagtaaataaatggtattttgagtataaaattagattttattagattattatttcgattttgaattgtatttttatgttggttaaattatttttaaatatagaaatagtgtattatttttattatttttaatttataggatgatttattatttaaaatatgtgattagttatgtggtaattgtttagatttatttatagtatatatttttgataaaaattattgtgttttttaaaaattatgttggaggatattttttgtattattttttaaattaaattatagaaatttttggcggatttttgaaatttaatttaaaaggtaatattgaaaaatttttatattaaatgattttattaaagtttaaatatttgatttttagattttttaaaatttattagaagattggtgttaaatttacgtatgtatttagaaaatgtttaataataataaaagatagagtttaaattttttaaattagaataatgtattaatttaaattttgatttttaaatgtatataattttatttttaaatatgagaaaaattgtatttaaaataagtggaaagtgaatattatattgttatttaatggaagaaatttatttaatttaagtttttttttatttgtaaattaattttaaaatattttgttattgtataaagaatgaatatattggtaaaatatatgtatttggttgattgtgttgagtttgtgaatttttaggtttaatttttgttttaaaaagttatgtgagataaatgttaaaatttagaagtgaagtaagtttttttagaatgtaattttgagaaaatttattttagttaatgggttttaaatgttatgttattttttgttataatttttgtattttatgttaaaatatgttaattaaaattttattttattttatgaaatttattgttgttgatatttagattgttttgttgtgtttaatataaggtttatagttgtttttagatagtaaatgtaatttaataatcgaataaatttttaagataaagaagtagtattttttaaatattgttattttataatatttattttatttgttttttattttataaatatttttattaaaaaggtttttagatttaaaatgtttaagtttattttttttttatgtagaaaatagatttttttttttataataaagttaatagtgattttaaattattatatttattaatatttttttaaaatttatttggtatgttggttttttagatatgtttaatgtttattttatttaagataaattaaattggaggggtaaaatgaaagatgtaaagagattattaattattaagatttaaagtatttattttgaaatatttaggttcggttatatgtaaattgttataggagttagtatttgtagatattatattggtggtatggttggagattggtagatattcggtagtattgtgatgtattattagaggtagagttgtagaggcgttagaatttagaggtataaaggtattagtcgaagtaaaagtttggtaatttatttttataagagagtagaaaaataaggagaatcgttgttttttaaattagagttttattatattattgttttaaagggtcgatttaatttttattatttgtatatatatattaggaaggttttgaggtattaggagggtgtacgttagtatttatattgtaaggaaatttttttatatatgttaatagtttttttttaggagtattgttttattaatttgaatcgttttttttttttattttaaatataatttatggtagagaaggaagttgattttggggtatagatggaggggaagggagaaatttgaaattttatttgataattttagtagtttagattttttagagaggaattaataattttgaaaatacgttttttaaaaaaataatgttataattaattgaaaaatagtaggtatttttttgttattaatataattgtaaatgtataaatatgagatttttttaaataattttttattaaatttgcgataaaatatgaaataaaagaagtgtatagtattatatataattttaagaaataatatttaagattatgagagaagtatataatattaaatatgagaaaatatgttgttaattaatgatttatatttaaaaatgtatagtttttaaaaacgatgataattaatataagttttattatattataagtgaaaaatggaaaaaaattggataaaatgtagtaatgataggttggtgtaaaagtgattgtattaatggtaagaatcgtaattattattgtattaaagttaaatataattaagatatgggtaattgttatttttatttcgattttaatttatttaagaatttaatatttagtaagttgttattagatgttgatagtattttaggtatttatatagttacgttatgtaaattttataatatttatgtgagttatgtattttgttatttttattaagttagattttgtgttataaagtttgagataattatggtagttgttaattagatgtaaattttttatataaaatatattgattttatatgagaatgaaaaaaataatatgttatagttaattattttaaagataaataatagtattaaaattttataatgattatgatttatgagtatgtaatgagtaaataaaatattatttatgtattgtatattaaggtaatatagtaaatagaagtaagcgaataggaatagatattattgatgtgagtagatattaattttgtattacggaatgttttaagataatttggaattggttgttttgtattaaattttatgttaatattgataagatatttttaaaaatttgaatattttgttagtaagtagttgatattttgaaggaaaatatgtaaaagtttgtttaaattattagatatggaatgaaaatatttattttaaaaatgatatatttttttattttgaattttatatttttgaagttttattagttttttttaatgagagaaagttttaagtaattaaaagtattattatatttttgtagaattttgattatttttagattttatatatataaaaaggtgatttttagtatgtttatttggagtttttgttaagaaaattaaataaaagtgtgtttattgggtattatgtatgttaaaaattaagttaaatgatatttatagaaaatgtaatttgaaaatgttttttaataattttattattgttatataaagttattggaatatgttggtaaagtatgtgaaaaatatattttatgaagtatattgaagatattttatgaagtattataaaatttgtttagtaaataatataaaatttttttagttatttattatgatatttaaaaagttttaaattgtaatcgtagaattttttttataattatttttaaaaattaaatatttgttttgttaaaatgaggtaaagttaggaaataaatgtttttattatagttttttacgatataatatatttataggattatttggaatgtatttttttaagatagatttttagaagtagaattattaagtttaagttttataaatttttaatattttgaaaatattattaatttgtatttttaaataattaattatattatgattttgatgtaaaatattaggagtaagttaagtaaaaagaattgtttattattaggagatataggagttttttggtatttatagaaaagaaggaagttaggttatagagatagattgaatagaaaatgagggtatatttttttgatttttttatttgttttttttttttttttttgttttatatttttttttttttttatagaatagtttaggttgattttttatttatgtttattttaaaaatttttagattatgttttaaatttttaaggaggtaaatagattattttgtagttttttagtcgatatttatgataattttttttttttttttggggagttttattttgttatttaagttggagtgtaatggcgtgattttggtttattgtaaattttgttttttatgtttaaaagatttttttgttttagttttttaagtagttgggattatagggcgtttgttattatatttggttaatttttgtattttttgtatagatgggattttattatgttggttaggttggtttcgaatttttgattttaaaagatttatttcgtttcggttttttaaagtgttaggattatagatgtgatttatgcgttgggtcgaaagaaatatttttattggttataattttttgataagttttagaagtataaagatggtttttagtggtttatatttatgaatgggtaggatagttttggatatatttagatgtttgtagttattttcgttatagaatattgttttggaaaaaaatattaaaatatgattgatgtttttatattattttatattagtattagtggtgtaaaatttataattgtttggtatttttattgttagtaataatgtgtaaatatatatgttttattgatttgataggataatattttaatattttaatttgtatttttgattgttgatatgttttgtttttaggtttatatttgttatttgtatttatcgttttgttaattaatagattttatattttatttttttatttaaaggttatttagttttattatttatttgtgttttttataaatatattgaaaattttaatttttattgttttgattattgtatgattaaaatttttttaatgttttattttttaaatttatgttggattttggtatatatagtattttatgtaagagttaaatatgtggtttattttttgtatgtatttttaatgattttagattttaaaatttgattttatttaaaggtttatttatttatttttatttttgttttgttattttggtattttaagaaattttttattgatattttaagttgttatattttgtatgtttttagagtttatttataattatttagataataatgaaaattgtagtttaatttgaaaattattagataaataagaagaaaattttattttaatttaagatgataaaagaaaatatgtagaaaagaagttttcgttaggtgtttttagtttgatttatttatcgtatttttttttaaattaagtaaaggattgattttttttaaatattttgagttttaaaaaaaattatattttgagaaaaatatatataattttagaaaaaattttgttatattaatataaagatatatgtatatgtatgtttattgtagtattatttataatagtaaagatttggaattaatttaaatgtttattaatgatagattggattaagaataagtggtatatatatattatggaatattatttagtcgtaaaaaagaatgagttgatgttttttgtagggatatggatgaagttggaaatttatcgtttttagtaaattaacgtaggaatagaaaattaaagatcgtatgtttttatttttaagtgggagttgaataatgagaatatatggatatagggagggaaattttatatatcggggtttgtttgggagtgggggttagtggagggatagtattagaagaaatatttaatgtagatgacgggttgatgggtgcggtaaattattatagtaggtgtatatttatttaataaatttgtacgttttgtatatgtattttagaatttaaagtataattttaaaaaaatagttgggcgcggtggtttatgtttgtaattttagtattttgggagatcgaggcgggcggattatttgaggttaggagatcgagattagtttggttagtatgataaaatttcgtttttattaaaaatttaaaaattagttaggcgtggtggcgggttgtaattttagttgtttgggaggttgaggtttggagaatcgtttgaattcgggaggcggaggttgtagtgagtcgaggtggcgtttttgtattttagtttgggcgatagagtaagattttgttttaaaaaaaaaaaaagaaaaaaagaaaagagaaaaatatgtaattttagagaaaaattttattaagaattaatatttaaatttaattatttttgggttatatataaaattaaaatttttttttttttattttttatatttatgttttttaatttttttattttttttttgtgagtttagaagtagtatatatatttagtatggagatagattttgtaattaaattgtttggttataaatttaagttttatgttttagtggttatatattgatggataagtaattttattttttagtgttttgggttattttatttgtaatatggagataatagtaatattaaatttatttataataatatttggtatgtaataagtttttaataaatgttagtaattattaattgtaaaattttttaattattgtttatgtatagttagtttatgtgttttatatgtattattttattttatttttatattaatttagtgatataggtattagtttattgattgggaaattgagataaatttttattaaaggttatttagtaagtggtgaagttggtgtagtaatataagttatttaaagtttgagtaagttatttaatattgttttttattatataaggaaaatttatatagatat

SEQ ID NO: 133 - DNA, 5951 bp, Artificial Sequence
  chemically treated genomic DNA (Homo sapiens)
ggtgaagtagaattattttggttgaaggggacgtagagggtttgttttttattaaggttggtattgacgattttatagaatatagtttgaaagtttttgttgtaagattagttacgaaatgtatttttaggttataaaataaattaatttgttagattagaatgtttatttttatgaataggtgaaatgttggggatgtttataaaaagtaataattttttatttagttatttaaggtaattataattattaaaatatattttttagtgtttggattttttagtttttaataaaattatgtggtagtattaagagttaattttagtataaggaaggttgtgttagttttagttttgtgtttttttttgtttgtggagaaggtttgatttgttaattgtttttaatagggtgtggttttttgagaaaaatggtattttaaggtttaagaatattgtaggtattttagtttttatatttgtattttgggtagtaggaagataaaaaaaggaggaagaataaatttgtttgttttatttttttgagatagagttttgttttgtcgtttaggttggattgtagtggtgagattaaggtttattgtagttttaattttttaggtttaagtgatttttttatttaagttttttaagtagttgggattataggtatgtgttattatatttagttaatttttatattttttgtagagttatagttttatatgttgttagggttggttttgaatttttggttttaagtaattttttcgtttcggttttttaaaatttgttttttgaaaaagtatttttagaaattttattaaattaattttttataatttaatagttaaaattttgttatatatggttatatttagttgtaagggagtttgtgtgttgtattttagtaagatagatggaatatatttttgttgatattttagggttgttattaaggaatatttatttagtaatggtaatagttaggtagaagtaattattatttttttgtattattgtgttatgtgtgtattttattatatgtatagatttgtgttattattattatatttaggatatagaataattttattaattattttttttttttaaattttttttgtgtttattttttataattatatttttttttgtaattattttttggtaaatattgatttgttttttattattatagttttgttattttattaatgttatatagatggaattatatagtatatggtatataattttttgagattggttttttttagttagtataatgtttttgagatttattgaagttgttgtatatgatagtagtttattttttttaattgttgagtagtattttatggtatgaatgttttatttatttatatgaaaaatatttgaattgtttttattttttggtaattataatagttgttatttgtttttaagtgaagttaagtttttatttatatatatttttttatttgtatttatttattaaaattatttttttgagatagagttttattttgttatttaggtaggagtgtagtggtattattatagtttattgtagtttcgaatttttgtttttaagtagtttttattttttattttagttttttaaggagttaaggagttgggattataggtgtgtgttattatatttattttaatttttggttttttgtagagatagggattgtgttgtttaggttggttttgaatttttggtgttaagtaatttttttgttttagttttttaaagtggtaggattttaggtgtaattattgtatttggtttatatttttattatgatattatatataaggatattgtttgttaatgtgttgttttttttttatattgaattatatgtatttatatggtttaatttgtgattttattaaattttatgttaaattataatttttaattttggttgtggggtttggagggaggtgattggattatgggggtggattttttttttgttgttttggtgatagtgagtttttatgagatttggttaagtgtgtattttatagtttgtggaattgtgagttaattatatttttttgtaaattattttattttaggtatttttttatagtagtggaagaatagattaatatagaggtgtttggattattggggtagattttttatgaatggtttagtattatcgttttggtgttgtttttatgatagtgagtttttgtaaaagtgtgtggtatttgtttttttatttttttttttgtttttgtttttttgtgtgatgtataagtttttgtttggtttttattacgattgtaagtttttagagttttttttagaaatatagttttttttagtgttatgttttttgtatagtttatagatttatgagttaattaaatttttttttttgtaagttattaagtgttaggtatttttttatagtaatgtacgaatagtttaatatatgtatttttaagattttgtttgatttaaagtaaataatttagtgtagtggttaagagtacggttttttgtttgtgtttgaattttagttttaatatttaatagtggtgtgatattgggtaagttatttgatatttttatgttttaatttttttattttagataattgggataaagagtttttattttttagggtattgtaagggttttttttttttttttttaaagtgatatatgtgagtttgttgaggttaaagtagtgttttatatatttttttatttttagtatttagtaagtttatgagaatgtagatgtttataattttttattgaataaatgatattaattttataaataattttaatatatataattgtatatttattatttttttttaataaatatgaatatttattatgtttaggtattgtgttaggtattggggatagttggaaatataaataatttattaggaggaaaatgaaattttgatatagtttattttaagttatttttgtttttatagaattatttttttttaaataaaaattttttttatgaaaatttttttttatagaagtgaaatagtaaagaatgtataatatatatattagttttaatgatttttcgaaggttatattaatatattttttgaattaaagagtaaaattaggattaaatagaagataggaaattaaatgagggtatttgagtttttttttttaatggagatgattttaaatttgtggtttttagagtaggggtatgtatttaattatttttaataaggttgttaattttgagattttttttatagtaatgttggtgaaaataatttaggttatatttttagattaattagttaaatattttatttttttaagtgtgttggttggcgtggttttaaataattagattatagggcggtttaattatttggtttaaatagttatgtatatattttaaggtttaattattacgaataaattaattttatttttaaatcgttgtttgttattgataatagttttaattgtatttgtatagttaaaggagtttaacgagtattttaggattgatgattaaaattttatttattaaaataattgtatttatttggaaattagttttgtttttaattgtagaattagtagttttatttaatttaaattttagttatattttttaagatagattaattagagttgattttttttaaattttgtttattatgaaatatatttttttatttttaaaaaataaataaataaataaaaatagggttttaaaaattcgtaaaataattagatttgggattttgtttagggaatttcgttatttaagataaagaaaatttagtaatattatgtttagttattaagaaagatatgtgtaacgcgaaatttttttttaatattatatttattttgagaaatatagtaaaataaaatttacgatgaagttacgatttcgatatttttattagttattagtttattgttaggttttaaaaggtgttttaaggcgggaagaaggcgcggggggaagttttagaatatggggtttgtttcgattggggggagcggcgttagaggggcgtgaaggtagaaaggaagggtagggcggaaattagcgatttaataagacgtttagttttcgaggaagttagtttggcgttagaagtaagtagagtagaagagatttagggttaattaaaataattatacgatattttttttcgcgtttgtcggggtcgggttttttgtattagtagagtcgggggcggggattagttcggatttaaatttaaagcgggaggttcgcgtgtggtttagtaggtgttttatgttcggttttcgtggcggtcgttttcgtttttatttgtttagagggtcggaaattatttagcgaggagcggtttatttattgttgttaatgttttaattgcgcggaaattttgaagaaagtgcggagtatagggtacgcgggtcgtttattgtttttttacgcgtttttacgtttttggtcgttgcgttttttgtcgtgtttttataatgttataggttattgggggagatcggagcgaagttaggagggaagtaaggcgggaggaaaagggagaagtgtaagaagatataggcgttcgggatattatataatttggttttgagttagagggagcgtatgcgtcggcgatatttttggcggtaggagaaaggcgcgtatgcgtagagtcgagacgaaaaatgaagttatagggtgtttggttgattgagggcgttgttttagttatcgaagggttatagcgtttcgaaggcgcgtgcgtagagcgcgggaagggggtggagtttttttgagggggtcggggcgaatagagtcggtttcgcgcgttttttggcgcgcgttcggggagaggaaggagcgggagggggcggagaggagggaggaggtaagtagggcgggaggggggaggggagttagagcgagggagggtttatcgatcgggcgattttggttaaaatatttaaaatggcggacggaggagtagcgagttaagatgagagtttagtcgcggcggtagtagtagtaggtaattattatagtattttatatatttatatttatatttaatttcggttttcgttgttttttttcgcgatttagtataatttattagtatttaggattattataattaacggcggggagatggggggtcggggagtattgagttttcgtcgggcgttgagcggagggggaaagaggttcggagcggttaggcggagggggaagataaggggtaaagggggttgcgatttattgttttttttttgtattcggtttatttcgtcgtcgttcgtcgtttgttcgtcggtatcggttttttttttttgtcggtcgtcgttgtcgttttttcgtcgtcgtgttcgaattcgagcgggttcgcggcggggcggcggggtcggggtagagggagaggataataaagatattttatatatttatagttgttgggtcggcggggcgtagtagggcgcgggcgggcggtcggggtcgggcgggcgcggggtggggggcgtgaagggggatggaggcggcggcgagtataatgtcggggaggcggcggggtcggagcggatttcggcggtcggatattcgtacgcgttttttttcgggagcgggttcgggcgggggggcgttgttcgttttggggggcggtttttagggtaatcgggggtgcgcgcggggagagttttttgttcgcgtttcgcgcggggatgagttcgggggttacggttttaggtatttcggtttcgttttattggtttttaatgtttattttttgttgttagatggtagatatttattttattaataggagttatgtttatttttgtaattgatattttatttttgtttgtatagaataatgtaaaatttttattgaaaaggagtagtatttgtagtattaaatttttttgtgtgttat

SEQ ID NO: 134 - DNA, 5951 bp, Artificial Sequence
  chemically treated genomic DNA (Homo sapiens)
atgatatataaaagaatttgatattatagatattgtttttttttaatgaagattttgtattattttatgtaaataagaataaaatgttaattataaaaataaatataatttttgttaatgaaataagtatttattatttgatagtaagaagtgggtattggggattagtggggcgaggtcgaagtgtttggggtcgtgattttcgggtttattttcgcgcggggcgcgggtagggagtttttttcgcgcgtattttcggttgttttgagggtcgttttttaaggcgggtagcgttttttcgttcgggttcgttttcgggggaagacgcgtgcgggtgttcggtcgtcggggttcgtttcggtttcgtcgttttttcggtattgtgttcgtcgtcgtttttatttttttttacgttttttatttcgcgttcgttcggtttcggtcgttcgttcgcgttttattgcgtttcgtcggtttagtagttatgaatatgtaaaatgtttttattgttttttttttttgtttcggtttcgtcgtttcgtcgcggattcgttcgggttcgggtacggcggcgaggaggcggtagcggcggtcggtagaggaggagggtcggtgtcgacgggtagacggcgagcggcggcggggtgggtcgggtgtaggaggagggtagtggatcgtagttttttttgttttttgtttttttttttcgtttggtcgtttcgagttttttttttttttcgtttagcgttcggcgggggtttaatgtttttcggttttttattttttcgtcgttaattataataattttgagtattaataaattatgttaagtcgcgggggggggtagcgggagtcggggttgagtatgaatatgaatatgtaaaatgttgtaatgattatttgttgttgttgtcgtcgcggttgaatttttattttgattcgttgttttttcgttcgttattttgaatattttaattaaaatcgttcggtcgataaattttttttcgttttggttttttttttttttttcgttttgtttgttttttttttttttttcgttttttttcgttttttttttttttcgggcgcgcgttagggggcgcgcgaggtcggttttgttcgtttcggtttttttagaagagttttatttttttttcgcgttttgcgtacgcgttttcggggcgttgtggtttttcggtagttaaagtagcgtttttaattagttaggtattttgtggttttatttttcgtttcggttttgcgtatgcgcgttttttttttgtcgttagaagtgtcgtcggcgtatgcgttttttttagtttagaattagattatatagtatttcgggcgtttgtgtttttttatatttttttttttttttttcgttttgttttttttttggtttcgtttcggttttttttagtggtttgtggtattgtaaaagtacggtaaggagcgtagcggttagaaacgtgggggcgcgtggaagggtagtgagcggttcgcgtgttttgtgtttcgtattttttttagggttttcgcgtagttgaaatattggtaataatggataagtcgtttttcgttaggtaattttcggttttttgggtaggtaggggcggaaacgatcgttacgggagtcgggtatgaggtatttgttgagttatacgcgggtttttcgttttaaatttgaattcgagttaattttcgttttcggttttgttagtgtaggagattcggtttcggtaaacgcgagggggagtgtcgtgtgattgttttaattagttttaaattttttttgttttatttgtttttaacgttaggttggttttttcgggagttaggcgttttattaagtcgttaattttcgttttattttttttttttgtttttacgtttttttaacgtcgttttttttaatcgaaatagattttatattttgaggttttttttcgcgtttttttttcgttttggaatattttttaaaatttagtagtaagttgatgattaataaaaatgtcgaaatcgtaattttatcgtgaattttattttgttgtgttttttagagtaaatatggtattggggaaaggtttcgcgttgtatatattttttttggtaattagatataatgttgttgagttttttttattttaaatggcgaaattttttggataaagttttaggtttaattattttacgaatttttaaagttttatttttgtttgtttgtttgttttttaagaatagaaaggtgtattttatggtaagtaaagtttaaaaaaaattagttttagttaatttgttttgagagatatgattgaagtttaaattgggtagaattgttggttttataattaaaaataaaattgatttttaagtgagtgtaattattttaatgggtaaagttttaattattagttttagaatgttcgttggatttttttaattgtgtaagtatagttaaagttattgttagtgataggtaacgatttgggggtgggattgatttgttcgtggtaattaagttttagggtgtgtgtatgattgtttgaattaaataattagatcgttttgtaatttaattatttagagttacgttaattagtatatttaaggaaatgaaatatttaattagttaatttggaaatatggtttaagttatttttattagtattattgtaagggaagttttagaattgataattttattggaaatagttaagtatatgtttttgttttggggattataaatttgaaattatttttattaagaaaaagagtttaaatatttttatttaattttttgttttttatttaattttagttttgttttttggtttaaaaagtatattaatatgattttcggaaagttattgaagttagtgtatgtgttatgtattttttattgttttatttttataaaaggaaatttttatggaaaggatttttatttaaggaaggatagttttgtgagaataaaaatagtttaaaatagattgtattaaagttttattttttttttaatgagttatttatgtttttagttgtttttagtgtttagtataatgtttgggtatagtaggtgtttatatttgttgaagaaaaatagtgaatatatagttatgtatgttaggattatttgtaaaattaatgttatttatttaataaaaaattgtaaatatttgtatttttatgaatttattaggtgttaaagataggaaaatgtgtaagatattattttaattttagtaaatttatatatattattttaaaaaagaaaaaaaaaaatttttataatattttgggaggtagaaattttttattttagttatttaggatgggaagattgaggtatagagatgttaagtaatttgtttagtgttatattattattaagtgttagagttaaaatttaaatataggtaagggatcgtatttttaattattatattaagttatttgttttgggttaggtaaaattttggaggtatatgtattaaattgttcgtgtattgttataaagaaatatttgatatttggtaatttataagaaaagaggtttaattgatttatgggtttgtaggttatataggaagtatagtattgggaaggattatgtttttggggaagattttggaagtttatagtcgtggtgaaggttaagtaggagtttgtatattatataggagaataggagtaagagaaagggtaggggggtaggtgttatatatttttataagaatttattgttatgaggatagtattaaggcgatggtgttaaattatttatgagaaatttattttaatgatttagatatttttgtattagtttgtttttttattgttataaagaaatatttgagatggggtaatttataaagaggtgtaattagtttatagttttataagttgtgagatatatatttaattagattttatgagaatttattgttattagaatagtaagggggaaatttatttttatgatttaattatttttttttaggttttataattaaaattggggattataatttgatatgagatttggtggggttatagattaaattatatgggtatatatagtttagtataggaagggaataatatattaataaataatgtttttgtatataatgttataataaaaatgtaggttaggtgtagtagttgtatttaaaattttattattttggaagattgaggtaggaggattgtttgatattaggagtttaagattaatttgggtaatatagtttttgtttttataaaaagttaaaagttaaggtgggtgtggtggtatatatttatggttttagttttttagttttttgggaggttgaggtgagggatgaggattgtttgagggtaggagttcgaggttgtagtgagttatgatggtgttattgtatttttatttgggtgatagagtgagattttgttttaaaaaaatgattttaataaataaatataaataaaaaggtatatgtggatgagaatttaattttatttagaaataaatagtaattattataattgttaaaaagtagaaataatttaaatgttttttatatgaatgaataaaatatttatattatggaatattatttagtaattgaaaagaatgaattattattatatataataattttaatgaattttaaaggtattatgttgattgaaagaggttagttttaaaaggttatatattatgtattatatggttttatttgtatgatattaatgagataataaaattatagtgatggaaaatagattagtgtttgttaggagatagttataggggaagatgtgattataagggataggtataagggaagtttggaggaggggggtggttaatggagttgttttgtattttgagtatggtagtggtaatataaatttgtatatatagtaaaatatatatatggtatagtagtgtaggggagtggtggttatttttgtttagttgttattattattggatgaatgttttttagtaatagttttaaagtgttaataggaatgtgttttatttgttttgttaaagtgtaatatataggtttttttgtagttaggtgtggttatgtgtgataaaattttgattattgaattataaagagttaatttggtgggatttttgggaatgtttttttaagaagtaagttttgggaggtcgaggcgggaggattgtttgaggttaggagtttagggttagttttgataatatatgagattgtgattttatagaaaatataaaaattagttggatgtggtggtatatgtttgtagttttagttatttgagaggtttaggtgggaggattatttgagtttggaaggttaagattgtagtgagttttaattttattattgtagtttaatttgggcgatagagtaagattttgttttaaaaaaataaaataagtaagtttatttttttttttttttttgtttttttgttgtttagaatgtagatgtgaagattgaaatatttgtagtgtttttgggttttgaagtgttattttttttaaaagattatattttgttaggagtaattagtagattagattttttttataggtagagggaagtataggattgggattggtatagttttttttgtattggagttaatttttggtgttattatatggttttgttaaagattggggaatttagatattgggagatgtattttaatgattataattgttttaagtgattaaataaaaaattattattttttataaatatttttaatattttatttgtttataaagatgaatattttaatttagtaaattaatttgttttgtggtttagggatgtatttcgtaattaattttatagtagaggtttttaaattatgttttgtgaagtcgttagtgttagttttgatgaaaaataagttttttacgttttttttagttagaatggttttgttttatt

SEQ ID NO: 135 - DNA, 5576 bp, Artificial Sequence
  chemically treated genomic DNA (Homo sapiens)
tgggagtgattttagatagttgggatgtgtagagtttgagagagtgttagggagcgggttgggagttgaaagttgggtgtggtggtttacgtttttaattatgatattgggcggtagaggcgggaggattttttgaggataggaatttaagattagtttgggtaatatagtaaggttttatttttattaaaaataaaaaaattaatagggtatagtggtttaagtttgtagttttagttatttaggaggttggagtagaaggattgttttggtttagtagatcgaggttatattgagttattattgtattttattgtattttagtttgggtaataaagtgagattttgttttaaaaaataaaaataaaaaaagtttttgtgggggatttgtattgaggttttggaggggcgttagttgtgtttttcggttttttttttttatagatattattgttattattattaggtaaatatttttcgttttagtttttttttttattttttttttttttatttatttagggggcggggttagaggttaaggttagtgggtgggattggggagggagagaggggttgagtagttttttcgtaagtttttattttattaggttttcggtttggggcgttttttttttttatggcgggatatttggttttagatttcgttttttcgttttttttaggtggtggaggtgatgggttaggggggtcggagtcgggttgggttgattttcggatttggttaagtttttaaggtttttttggagggttaggaatcgggtcgggggttgggttaggttttgaggtgtgggggatttttttatgtttttcgtcgtatgagttttgtggggggatggcgtattgtgggttttaggttggagtggggttagtgttttaaggcggtttggagattttttagtttgagggtgaagtaggagtcggggtggagagtaatttcgatggggttttttcggagttttgtatcgttatttttggtgtcgtgaagttggagaaggagaagttggagtaaaattcggaggaggtaagtgagtttcgacggggttggggtgtggggaggtggttatgatagggtagtttgatggggaagtggttatttgtagttgtttagatttggtatttaggagaggagtaggtagggttagttgttttggttagggaggggtgtgtattaattgtaggtagttttggtaggtaggggttaggtgggaattggaagttggatttcgaagagataattgtaggtgagggtagagcggtttgggagagtcggaagttggtttaggttggtttttgttttgtttggtttagtttttgttagggttttttatattttttaggtttgtttagggtttggttatttattattggtttagtattagatttagtttggggttggtttgagtttttttttttatttttagttttgtttgaaaatttgatttttattagatttaagattttggttttagggttaagtatagtttgagggtaaaaatagtgtttattttaggattattgtttttgaaagtttagggtgtgattcgtttttgataggattttttgtttgggttgtgtgtgtgcgcgttgtgagttgggtttatttttagttaagtatagggtttgtttttttcggatttttgttttaggttaatgattggttattgtgttaaggtgtatattttggtattttttgtagaaagttggattttgattgattttagttttagttttaaagttgtaaataagaaaaatggtgagagatttttttaggttatttgtaaatatagagttgttgcgggattgaaggtatttagttttgttgaggattattaaagatgtattttttagttttttaaggcgataagtgtaagtaattagagattaaatattaagttttgagattttatagaaaggtgtgattggtttttggagtgatcgagaagttttaattttttcgtaggaggttattgttgagttttgaatgataatggttggtaattgtggtttattttttaagtgtttggttgtgtgtttcgtttatatattattattttattaattagtataaaattttttagggggaggtattattattttatttaacgggttttaattgttaaatgatgaagcgaggatttggattagtgtttattttaaaattttaaaatagaatttggaaaatttaggatagtagagggtatttattagtttgagttattggttgagtagaagttggggatgaaaatagtttatttgaaattgatatgattaagtattattgaaatatttttttgaggttttaggattataaaaaggttttgttttttttttattagttgtgtatttttgttcgtcggtagttttatatggtatgttttagggtttagttttttaatttttgttttatttatttttttttttttttatttatttttaaggtttaaatgttatttagatattagatgattatcgcgttttttgttttttgtgatggttttttgaattgttttattttgattatttagttgtttaaggttaaatttagttatttttagttttttttacgttttatattttatttttaagaaatattttgaattaattataatttaattttggttttagttattattatttttgttgggattatcgtagtagttttttaaattatattgttttttttttattgtttgtggttaatacgttaattagagttagtgttttaaaaggtgtggttaggtattttgggaggtcgaggtaggcgaattatttgaggttgggagttcgagtttagtttgattaatatggcgaaattttatttttattaaaaatataaaattagttgggcgtggtgacgtatgtttgtaattttagttatttaggaagttgaggtaggagaatcgtttgaatttgggagatgtaggttgcggtgagtcgagatcgcgttagtgtattttagtttaggtaataaaagcgaaatttttaaaaaaaaaaaaaaaaggtgaggttaggtgcggtggtttatatttgtaattttagtattttgggaagttaaggtggatagattatttgaggttttttgattagtttggttaatatggtgaaattttatatttattaaaaatataaaaattagtcgggtatggtggtgggtgtttgtagttttagttatttaggcggttgaggtagaatagtttgaatttagaaggcggagattgtagtgagttaagattacgttatagtattttagtttgggcgatagaacgagatttcgttttggggggggagaaaaagggtgagagattattttatttggattaaaataaagttattatgtttgtaataggatttatttagttattagattagttttgggttttggaaggtttattttagggttttgttatattagatttttgttttttgtttaaataattattttttttgtttttaaaagtgttatttttttttataattttttttttttttttattttatttttatagattgttttattttttttttaatttttgagatggagttttattttgttttttaggttggagtgtagtggtgcgattttggtttattgtaaattttattttttaggtttaagtaatttttttgttttagttttttgagtagttgggattataggggagcgttatgatgtttagttaatttttgtatttttagtagagatagagttttattatgttgattaggttagttttgaatttttgattttaagtgatttatttattttggttttttaaagtgaagggattataggtatgattattgcgttcggattgttttgtttttttttataatatatatatattttttaaatagaggtagtaggggtgggagaaggggcggtacgggttttattatgttatttaggttgttttttaatttttgggtttaagtagtttgtttattttggttttttaaagtgttaggatttatagatatgagttattgtgtttggttattttttattttatttatttttttattttttagagtaggagtggaagtttattattaaaaagttatagggtagggaaaaaaggaaagtgtatttggaagagatttaagtgggtaatttgaagaataagtgtcgaatagtatttttgttatgttggatgttagggttttttgtttattttgtatagtcgttggtttatagaaggtgttcgataaattttttgaatttaaaaattaattaggatgtttttatagtgaaaaagatatagtaaagatgagggataattaatttaaaaaatgaggagtaagtatatataaagtattttatttatttttatgatatttgttatttttttgttgtgtttgtgtgtatgtatgttatgttatagtttgtgggatttttaaagtaagttggggagagtatatattgaatttagtttttgagatatgatgttttttttttttaattaatttagaatttagtagtttatttatttttttaattttaaaatatttttaaattgggggtgatatttgagtgagagaattttgtaggtattaaatgaattattttttttttttttttttttgagatagagttttgttttgttatttaggttggagtgtagtggcgtgattttagtttattgtaattttcgtttttcgggtttaagtgatttttttgttttagttttttgagtagttgggattataggtgcgtgttatcgtgtttagttaatttttgtgtttttagtagagacggggttttattatgttggttatgttggttttgaatttttgatttcgtgatttgtttatttcggttttttaaagtgttggaattataggtatgagttatcgcgtttagtaaagaatttttaatttttataatttgataggtgtttttttcgaggttagggtttttttttttgtttttttacgatgttttgtattttttggatgtgttagtttttgggggaagagtagttttttgttatatgtatgagttagtgaatagggaatgggtgaatgatatttgtgggtaggttatttttagaagttaggtgggtagtttggaaggtagatgtatttttatagattattttttggggttatacgtaggtttttgaatttcgaatggaaaggggagattgataattggtgtgtttatgtttttataagttttttgttttttaaaatttagttttaggatattaaagttttgtagaaagaattcgagtaatttgttaagtttttgaagtagaagaggattattttgggatatatataggtcgatgtggggtttattttgggggttttatttggtgggtttttttttgtagattttgatcgtattttttttttaaggagtatttttgaatttagtggggaggggtaggggtagattttatttttatttatgaagaggagtagggagagggagaagatgtttgggttttgagttttttttgggaagaggtggtaagtttggattttagggttataagggttttgcgtgtttttttattttgttttttttttgattggttttttttagg

SEQ ID NO: 136 - DNA, 5576 bp, Artificial Sequence
  chemically treated genomic DNA (Homo sapiens)
tttgggggaggttagttaaaagagaagtaaaatgagggagtacgtagggtttttgtgattttgagatttaagtttattatttttttttagagggagtttaaagtttaagtattttttttttttttttatttttttttatgggtgagggtagagtttgtttttgtttttttttattaggtttagggatattttttagaggggagatgcggttagaatttgtagaggggaatttattaaatagaatttttagggtgagttttatatcggtttgtgtatattttagggtgatttttttttgttttaggagtttggtaaattgttcgagttttttttgtagagttttgatgttttgggattggattttaaaaggtagaagatttgtaagaatataaatatattagttattaattttttttttttattcgggatttaagaatttacgtgtggttttaaggaatagtttgtagaagtgtatttgttttttaagttgtttatttaatttttagaaataatttatttataaatgttatttatttattttttgtttattgatttatgtatgtaataaaggattattttttttttagaaattggtatatttaagggatgtagagtatcgtgaaaggatagaaagagagattttggtttcgaggagaatatttgttaggttatgaaggttagaagttttttgttgggcgcggtggtttatgtttataattttagtattttgggaggtcgaggtgggtagattacgaggttaggagtttaagattagtatggttaatatggtgaaatttcgtttttattaaaaatataaaaattagttgggtacggtggtacgtatttgtaattttagttatttaggaggttgaggtaggagaattatttgaattcgggaggcggaggttgtagtgagttgagattacgttattgtattttagtttgggtgatagagtaagattttgttttaaagaaaaaaaaaaagaagatagtttatttaatatttgtaaaatttttttatttaagtattatttttagtttaaggatgttttgagattagagaaatagataagttgttaagttttgggttaattaaaaaggaagagtattatgttttagaagttaaatttagtatatattttttttagtttgttttgagggttttataaattataatatggtatgtatatatataaatatagtaaaaaagtaataggtgttataagaatggataaagtgttttgtgtgtatttattttttattttttaaattgattattttttatttttattgtattttttttattatagaggtattttaattgatttttaaatttaagagatttatcgagtattttttataagttagcggttatataaagtggataaagagttttgatatttagtatgatagaagtgttattcggtatttgttttttaagttgtttatttggattttttttaagtgtattttttttttttttttgttttataattttttaataataaatttttatttttgttttgaaaaataaaaaagtaaataaaataaaaaatggttaggtatagtggtttatgtttgtaaattttagtattttgggaggttaaggtgggtagattgtttgagtttaagagttagaaagtagtttgggtaatatagtgagattcgtgtcgtttttttttttatttttgttgtttttatttaaaaaatatatatatattatggaaaaaagtaaagtagttcgggcgtagtggttatgtttgtaatttttttattttgggaggttaaggtgggtagattatttgaggttaggagtttaagattagtttggttaatatagtgagattttgtttttattaaaaatataaaaattagttgggtattatggcgtttttttataattttagttatttaggaggttggggtaggagaattgtttgaatttaggaggtggagtttgtagtgagttaagatcgtattattgtattttagtttgagggatagagtgagattttattttaaaaattaaaaaaaaaataaagtagtttataggagtagggtaaaggagggaaggagattatggaggagggtgatatttttaaagatagagaaggtgattgtttgagtaaaggataagagtttaatgtggtaaggttttgaagtgggttttttagagtttaaagttggtttggtggttaggtagattttgttgtagatatagtgattttgttttagtttaagtgaaatgattttttattttttttttttttttttaagacggaatttcgttttatcgtttaggttggagtgttgtggcgtgattttggtttattgtaattttcgttttttgggtttaagttattttgttttagtcgtttgagtagttgggattataggtatttattattatgttcggttaatttttgtatttttagtagatatggggttttattatgttggttaggttggttaggagattttaagtgatttgtttattttggttttttaaagtgttgggattataggtgtgaattatcgtatttagttttattttttttttttttttttgagagtttcgtttttgttgtttaggttggagtgtattggcgcgatttcggtttatcgtaatttatattttttaggtttaagcgatttttttgttttagttttttgagtagttgagattataggtatgcgttattacgtttagttaattttgtatttttagtagagatggggtttcgttatgttggttaggttggattcgaatttttaattttaggtgattcgtttgtttcggttttttaaagtgtttggttatattttttaaaatattgattttagttgacgtgttggttatagatagtagggaggaagtagtataatttgagaagttattgcggtaattttagtagagatgatggtggttgaggttagggttaggttgtgattgatttaggatgttttttaaggataggatgtaggacgtgaaagaaattgaggatgattgggtttggttttgagtaattgggtgattagggtggagtagtttagggagttattataagagatagaaaacgcggtagttatttggtgtttaaatggtatttaagttttgagggtgggtgagaggaaggaagggtagatagagtagaggttgaaggattgagttttggggtatgttatatgaggttgtcggcggatagaggtgtatagttagtgagaaaaaaataaggtttttttgtagttttgaagttttaaggaagtgttttaatggtgtttgattatattaattttaaataggttgtttttatttttaatttttgtttagttaataatttaaattgataaatgttttttgttattttggattttttaaattttgttttggggttttggaataaatattggtttaaattttcgttttattatttagtagttaaaattcgttaaataggataataatatttttttttaggagattttgtgttggttaatgagataatgatgtataaacggagtatatagttaggtatttaggaagtggattataattgttagttattattatttaaggtttagtagtgattttttgcgaagaggttggggtttttcggttattttagaaattagttatatttttttgtgaggttttaaggtttagtatttaatttttaattgtttatatttgtcgttttggaggattggaagatatatttttaatagtttttagtagggttggatgtttttaatttcgtagtagttttatatttgtaaatggtttggagaaattttttattattttttttgtttataattttggaattgaggttgaagttaattaaaatttagttttttataaggggtgttagggtgtgtattttaatatagtggttagttattggtttgaggtagagattcggggaagataagttttatatttgattggaggtaaatttagtttataacgcgtatatatatagtttaaataggagattttattagaaacgagttatattttagatttttaggaataataattttggaatgagtattgtttttatttttaggttatgtttaattttaaggttaaaattttgggtttgataagggttaaatttttaagtaggattaagggtgggaaaaggggtttaaattaattttaagttgggtttggtgttgggttagtaatgaatgattagattttgggtaggtttaggagatgtgagagattttgataagggttgggttagatagagtaaaggttagtttgggttagttttcgatttttttaggtcgttttgtttttatttgtagttgttttttcgaaatttagtttttagtttttatttggtttttgtttgttagggttgtttgtagttgatatatatttttttttggttagggtagttgattttgtttgttttttttttgggtgttaggtttgggtagttgtaggtgattatttttttattaggttgttttgttatgattatttttttatattttaatttcgtcgaagtttatttgtttttttcgggttttgttttagtttttttttttttagttttacggtattaggggtgacggtgtagggtttcggggaggttttatcggagttgttttttatttcgatttttgttttatttttaggttgagaggtttttaagtcgttttggggtattagttttattttaatttggggtttatagtacgttatttttttatagaatttatacggcggggggtatgggggaattttttatattttagagtttggtttaattttcggttcgatttttggttttttaggagggttttggaagtttagttaggttcgaggattaatttagttcggtttcggtttttttggtttattatttttattatttggagggggcgagaaggcgaaatttgaagttaggtgtttcgttatggggaaggaaggcgttttaagtcgggggtttggtgaaatgagggtttgcgaagggattatttaatttttttttttttttttagttttatttattagttttgatttttggtttcgttttttggatgggtggaggagagggaggtggggggagaaattgaggcgaaggatgtttgtttaatggtggtggtaatggtgtttgtggaaggggaaaatcgggagatataattggcgtttttttaggattttagtgtaggttttttatagaaattttttttatttttattttttaagatagggttttattttgttgtttagattggagtgtagtggagtataatgatggtttaatgtagtttcgatttattgggttaaagtaatttttttgttttagttttttaagtggttgggattataggtttggattattgtgttttgttagtttttttatttttagtagagatggggttttgttatgttatttaggttggttttgaatttttgtttttaagaaattttttcgtttttgtcgtttagtgttatgattaaaggcgtgagttattatatttaatttttaatttttaattcgttttttggtatttttttaggttttgtatattttagttgtttggaattattttta

SEQ ID NO: 137 - DNA, 11036 bp, Artificial Sequence
  chemically treated genomic DNA (Homo sapiens)
  unsure (1927..1928, 1943, 1956, 1958, 1981)
gaaagagtagtgggtaaagatgtaagatatttaagatagtagttttgagaatttattatggaggataaaagagagggaagggtaaagaatagtgggtcgggaatagtggtttatgtttgtaattttagtattttgggaggtcgaggcgggcggattatttgaggttaggagtttaagattaggttgattaatatggtaaaattttgtttttattaaaattataaaaattagtcggatgtgttggtgtacgtttgtaatttttgttatttgggaggttgaggtaggaaaatcgtttgaatttgaaaggcggaggttgtagtgagttgagatggcgttattgtattttagtttgggtaagagatggagtttcgttttaagaaaaaataaaaataaaaaaaatagtgtttagattagataaagaaattaatatttatatatattaatatgtagtaagttcgggtaaagtttgtatttaatgtttttttttttaatttagttgaatttgtattatttagttattaaagagggaaggaatttgaattaatgggtagaaataatataagaaataattatacgtgatatattttgtaagtattaaaatggttgttataaatttgtagatgaattttggaaagattgatgaggattgaaaatgatttatggaattgaaatttaagagtttgggaaagtatagaatttatataaaggataagaaaattttaggattttgttgtttaataaggtagttattagaaatgtggttattataagttgaaatgttatttgttaaaatatatattgtattcgatataaaaaattgtaaaatatttaaagaattttttattttgattttatgttgaaatgtattttgtgtatatagggttaaataaaatatattaaaatgggtttacgtttgtaattttagtattttgggaggttgagataggtagattatttgaggttaggagtttgagattagtttggttaatatggtaaaattttgattttattaaaaaatataaaaaaaaattagtcgggtgtggtggagtgtgtttgtaattttagttatttggggggttgaggtaggagaattatttgaatttggaaagtggagggtgtagtgagttgagattttgttattgtattttagtttgggttatatagagcgagattttattttaaaaataaagtaaaataaataaaaaataataataaaaaaaattttttatatatatatatatatatatatatatatatatgtatattgttttagttttttttattattttttttttaaagatgtcgcgtatagtggattttttgtcgttgagtttttattagttagtatttttttgggatatatattatagatagagtgtatttcgtgtaatacgtattttggtgagttaatttgattggtatatagttacggattttttggagtgatttattaaagttagggttgtagaggggaaggggtgtagtttatcggtttcgatgaaaggggtttcgttcgttagatttggatttcgtttttagagatggggtgttggttcgttttcggtgatatggtattggcgtttttcgtgtggggatgtgagcggtgtacgtgattggacgtgtggttgtggagtgtgtggttggatagagcggggtggagtagtgagaatgatgtgaggggttggggggggtgggggggggtgggtaggtttcgtggggtgtggtgggggagggggtaagtgtggagaggaggattatgacggaatggtgggtgattgggtagaggtagagaggaggtcgtaaaaggatcggtaggatttggaaggtattggaatattgggggaatttgggaaagcgggcggtaacgtggggggaagtgtggggtatggtgggtgaaattgggaggaaattgggtgaaaatgtgggnnnaaaaattgggaaanaaaaatgggggantnaaaaaaagttggtggagtgtganaaaagttggggtcggagagtgagggtatcgtttttgggagtttaatggtcgagatgtgtcgggcgcgaaataatatatttgtgcgagatagattaagagtaaagagtaaaggtaagtatgtgtatatgtatatatatatatatatatatagaaatatattgtattagttttttttattattttattttttaaaatgtggtttatagaagataaatttatattatatttttattagttagtaatgttttgggaaaaataatataaataaaatgtatataatgaaaaataaattttggtgaattaatttgattggaatatagttaaggatttataggagagaaaaattaaagttagggttgaagaggtagaagggatagtagtatttaggatttgaatgaaaagggattttagattggatagattggatttaatatttttagagatgttatttttgtttttgttgttatttttgttttttagagattataaaagtgatatttaagaaaaattaatttgttaacggtatataaatggaaagaagtggaagagtaaagattttagagatttgttattttagaggtataggtattatgattgtaagaaaaattttggtttttgttttgattttagggagttgatatttaatattatttgaattttttttgttgagtttatagtttttttttttttttttttttttttttgagatagagtttttttttgtcgttaggttggagtgtagtggcgcgatttcggtttattgtagtttttgatttttcggtttaagtgatttttttgttttaggttttcgagtagttaggattataggtatacgttattacgtttagtaaatttttgtatttttagtagagtcggggttttattatgttggttaggatgatttcgattttttgatttcgtgattcgttcgtttgggatttttaaagtgttggggattataggcgtgagttatagcgttcggtttgagtttatagttttttaaaatttgaatttagttattttttatgtggaaaagaatgtatttagtagttataaaagtaatttgttttattatatatatagtaattgggtgtgtggaaaaaattagtatttgtttttttttagtataaatagtaagaataattttttttgatagtgtaatttttttgtttaaaggttttggagttttttaaagttatcgtggtattaaagattattggaacgaatatatatatatatatatatatatatatatatatatatatattattatggtattaaagattatttaaaaatagtttttttttttagttattatggaattagattattttaatacgcgcgcgtatatatatatatatttatgatattaaagattatttaaatacgtatacgtacgtatatatattttaagttatcgtggtattaaagattattttacgcgcgcgtgtatatatatatatatattatggtattaaagattatttatatatacgttttttagataggttttttttttttttttttgagacggagtttcgttttgtcgtttaggttggagtgtaatggcgcgatttcggtttattgtaattttcgttttcgggtttaagcgatttttttattttagttttttgagtagttggggattacgagcgcgcgttattacgtttagttaattttttgtatttttagtaagagacggggtttcgttatgttggttaggttggtttcgtattattgattttaggtgattcgttcgttttggttttttaaagtgttgggattataggcgtgagttagttagttcggtttttagataggttttttaaaagttttaattattaatttttttagaaaggttattaattttacgggtaaagtaagatttaggttttgacgaattaagattgatttgtttgtattttgtaatagttattgattataaataatatttttaggtatttttttattttttggttatttttcgtttttttttattttgttttttttttttattttcgaggtagtaaagttcggggaggttcgggagcgtttgggttacgtgtgcgtacgcgcggttgtttagaggcgttgttgtagggaggcgggatagagtttcgcggttcgtacgtggtcgcgagtttacggtttgggggttagggagatcgtgaagggttcggatttttgttatttatttttacgtgtcgttattattttaagtgggttgagggttgcgatcgcgtcgggaagcgaggtagaattttagaaaagaggggtggttagagagttcgttgggcggggaaggaggcggggtcgcgcgattttgcgttatttttttcgagttcgttatagtcgtttaattcggaggggtatgggcggagattgaaacgcggatatcggacgaaataacgttttattggtttttcgtcgtaggcgtagagacgcgatttcgttttcgggtcgtttcgttggcgtagtgttcggataggcgaaaagtgcgcgtattggcggtttttttttattttgcggaagttcgtatatttcggttttttttcggttgcgggagcgatttagaagttggagcgtattaagttttgacggtttgggggaagtatgtagggaagggtatatgaaggttaaatgttttgaaagagaaatgaggttaagttcgttatttttattacgttattgttgggtgttggaaaataacggagatttttacgtgtagtaaatatagttttttaggtagtttttaggggaaggttagttttattttatagtattcgtgatttcgttttttagtcgcgggatcgtttttgcgttttcgttcgttggtggattcggagggggaggagtagggttgagttgttacgttatttagggagtagcgcgcgtcgggcgtagtagttggggttattttcgggaaggaagagtttgtgcgagcgtagtttttgagtcgacgggtcgagttggtagttggttggtgtttatattttgcgcgtagcggtaggtttttttacgtgttttcggcggcgatatggagttggaggagttggggattcgagaggaatgtggcgtgttcgggtgtatcgttttaggagagtggtttacgtagttggatgtatcgtatgtgattattttgggattcgtggggttgtagtatcggtgagtaatagggtgggggtggcgggggcgtgcgtttttatttttcggagttagtttttcgtagtcggcgtttttatgagcgtttcgagggttcgggagatcgattttttcgatttaagttagtatttgtttgtggcgtcgatttgggttgtttaggcgtgtacgaggggtattcgtttttatgaattttagtttgttttgtttatttttttagttatttatgttttttaggggtttttttttttttcgtttttcggttgtgtgtacgtatttagaggttggttagtttcgtaaatcgtcggtttgtttggtttagttgggttagggttttttttcgattgtaggcggtgtttagtttttcggagtttgtgcgtgtttttgtaataggttagtgtggcgtgtcggtagtttaggttttttaatagttaaaggttttcgcgcgcgcgttcgaattattataattttttgtttgtaatcgtagaggtatttgagtagattattcgtttgaaagtagttatagttatcgtaagttgaggatggtatagtttatatttatcgaagtagtcgtcggggagttcggaatttttatttatttgtgagatatgtttgtcgtttttaagttttttaattgtaatatttaattttagattatgattaattttgcggtataatttaaagattatttttaatgtaattaaaatgttaatgtgtttataattttataatttaaaaatgtaaagaataattagtggtattgtggaaagtatatgggaagagggtgaaaattagggagttcggtaaagaggttatattaatattttatatgagatatgatgaagttttggttagttataatgagaatagagtagagagaaaattttatgtagtatgttagtagattttttaaagatttagtgattgattaaaaattaaggatattttaaatgtttttgtataagtgattggaaatatagtgatgttaaggtggaagtaatttgtaggaggattaaatttaggttagatgtggtggatcgtgttttatttcgggaagtcgaagtaggagaattttttgaatttaggagtttaagattagttagggtaatatggtgggaaatttattttataaaaaattagttaggtatggtggtttatattttatagttttagttatttaggaggttgagttgggaggattatttgagttttggaagttgaggtagtaatgagttaagattatattattgtattttagtttgggtgataggagtgaaattttttttttaaaaaaaaaaaaaaaggtgatgggagaatagagagtttgattttggaattgggagtttgaggtaattaaacgtgtatagttatgttgtaaggatagtttttttgtttatgagtgaaaacgaaggagtttggagttaagggagtatttgaaagcgttgaagatttttttaagaagttgagatattggtatttatatttttattagattaatttttggttaaaatcggggatttttagaagttaagtgatttatttatttattaattaatatttaaagtatttaaataatgaagagtcgaaggtgtttaattgaataaaataatgcgattgttgtttaatatggtaataattgtaaagtttttttagaatttggtgttattttagaaatggaaagaatgtaggtagggtggattttttttttaatgaaatgatttgttattgagttgtaaatatgaaaaatagttaatttaagttaattagttgtaatttttgtttttttaattttatttatatttggtatttttattatattatttattgtttttttttaggtgttaaatttatttgtagttttgttttttttgaggtttcgtattattaaacgtatataatttagtgttttgtttatggtatatatagatagtgggtattatagatttttgaataattttgtttttgaaatagtatttataagatttagattatggtagatattttattattgttattgatttttttttttttgtttattaatgtttttatagataatgagtagattttatgtaaatagtgttgggtttaataatatagtacgttaagaaatttttgtaaattatttagttttagattattttatgtattaaatttttattatattttattgttaaaatggagttgtttttttttattgttaaaatggagttgtttttgtaaataagtaatgaaatagtgtagaatagttattttaaatgtgtttttatttataaatttaggaaaacgtaaattaaataaaggagaaagtttttgtttggagttgtggaaaaatattagttgagtaatgtttttgatatttttttttttatttattatttttataaaattaaaatttaaattatttttagaatttaatttatattttaaaaatatattatatgtagttggtattagtagttagtgttattgtaatgtgttttttttgtattttatagatttttttaaagtggtaatatttaatttttttttaaaaaaatttttaattttgtgtaaaatagtataataaattggttatttttttatagttttgatattttagtttatatttattatatggttatagaagttttgaatttttatagtttataaaattgtaaaataaaagaaaaataagagtatttttttttttttttttttttttttttttttttttatttttagtggtttttggggttgtatttgggttgagcgtttttaggtatttgttatttgtatttttttttgtaaattgtgtggtaggtttatattgtaggattatatttaaattatggaagaattttatagttttagagttgtttttagagttatgggtatatttaattgttttatatttatatttgagatttttgtatttagtttagtattgtttttagtttttgtatatttttaatgattgtagttttttagtaatgtaaataaatatttttttattttttagtgttttataaagttgttttcgtatatttttttttgtttagatatttagtaaagttttaattttttttttagtttagtgtttttttgttttattttttatgttgaaagtgatttggaaatgatttattatttttagttaaggttttgttttttaggaaattatatggttggttgttaataagtttcgaagagttgaaaggatgtagtttaattggtttaagttgtttgagggagtaatttgagaaattgttaaataagtaggttttgtgattaaagaagtttggatttaaatgatttttaattatattattttagtttgaaggaaaaattttttttgagataaaagggaaagaaaatcgttttttgtgtatttttttttttatataatttattgttttattaaatgattgttgatttttaaaaattgttttgaaaatggttggtagaggttttttttaagaggtttatagttaatgttaataatatattttttttgatatgaattatttagttttttaatattggttaatttatagattttatagtattttattaaataaaagaaattataagttaatttatttagttttatatggtatatagtattatgtatatttatttttagtatttaatgtatttaataaaattattttttgaggttgttgtgagttgtgattatgttaagtttttttagagttttatttggtaatatatttaatgttgttatttttttcgttaataaaatattgtaataattgtaatatataattttgaaaaaggtttttttttattaaataaattaatgtattaatagttattaaagtttataggtatatatggaagaggtttattttttgtttttattttgatatatattttttggaataaaaattggttaataaatatttattatttatagtatttgtttagaattattaaaaatggtaaagtagttggaatttttatgagagtttatattgtatagtggtatggatgtttttagtttttattatgttttgttttatttttagtttagattttggtttttttttttgtattattatttaattaatattaatgtaggaaatgagatatagatatgggaaagggtgtttggttagtagagggtttttagaaataaaatttttttttttaatagtaaaagtgttatttattggagaatatttggaaaatgtagaaaggtataaaaaatggttattaattatgtattttgtttttattatatttggagattttaatttatatttatatatttattttgttgaaattttatttaggggttataaagagtagaggttagaagtataaattttgtagttggattgtttgtattggaattttggttattatttgttgtttgtgtgataatgggaaagtaattttttttttattgttttagtgtgtttatttgtaaaatgggtatggtaattatagtatttattttataggattgttgtgaaaattaaattatattacgtatgttatcgatttaaataattaaaaggattagaatttaatttagagagagtttatttaagtattaagtttgaggatgttttatttagaaatattaattttaaggaatggagttagtattgtaaagtaggaaagttaaggttttatttttataggtagatagaggagtttttagtagaattataatattttttatataaggttagcgcgtttagttatagtagtttgattgttataggtggtggtttttttggggagggtatatttaatatttttttatagaggatgttaatgggtttttttttatttggtttagtaaagtaggataataaaataaaagttaattttttttttttttttttttgaaacggaatttcgttttgtcgtttaggtcggagtgtagtggcgcgattttagtttattgtaagtttcgttttttgggtttacgtcgtttttttgttttagttttcggagtagttgggacgataggcgttcgttattacgttcggtttattttttgtatttttagtagagacggggatttatcgtgttagttaggatggtttcgattttttgatttcgtggtttattcgtttttatttaggagttaatttttaataaagtttattatttgagaaggtaggaggttattgtttttgatgtttttttttttttttttttttgagacggagttttcgttttgtcgtttaggttggagtgtagtggtgcgattttggtttattgtaatttcgtttttcgggtttaagtaatttttttgttttagttttttgagtagttgggattataagcgtgtgttattatggttagttaatttttgtatttttagtagagatagggttttattatgttggttaggatggtttttagttttgattttgtaattcgtttacgttagttttttaaagtgttgggattataggcgtgagttatcgtattcggttgtttttgatgttttttaattttttttagttattgtatagaataagaaaaataagaaagtgagttaatttataatttgagaaatagaagttgtaattatatgtgatttggattatagttatattttttttaaggtttaaagtatatttggggttttaatagtttttaaattatttatttttataacgtaaaatgttaggatagattgtttggtatgttagttaatattagatgagatatttaattgttatattgttatttgttgtgattgttaattattagtattagtattattaatagaagtagtgttagtataagtagtatttaatgtgttgttatattaagtttatggatgtttgttgagaaagtatgtttgataaagttttttaagaagttaattaattggtagatttaatagttaatatttttttatatttatagg

SEQ ID NO: 138 - DNA, 11036 bp, Artificial Sequence
  chemically treated genomic DNA (Homo sapiens)
  unsure (9056, 9079, 9081, 9094, 9108..)
tttgtgaatataaaaagatattagttgttaaatttgttaattgattagttttttgaagaattttattaagtatatttttttaataagtatttatgaatttagtgtgataatatattaaatgttatttgtattagtattatttttattgatgatgttgatgttgatgattagtaattatagtagatgataatgtaataattagatattttatttaatattaattaatatgttaggtagtttgttttagtattttacgttgtaaaaataaataatttaaaagttattggaattttaaatatattttaggttttgagagagatatgattgtgatttaagttatatatggttataatttttgttttttagattatagattaatttatttttttattttttttgttttatataatgattagagagaattaaaagatattagagatagtcgggtacggtggtttacgtttgtaattttagtattttgggaggttgacgtgggcggattataaggttaaggttggagattattttggttaatatggtgaaattttgtttttattaaaaatataaaaattagttggttatagtagtatacgtttgtagttttagttatttaggaggttgaggtaggagaattgtttgaattcgggaggcggagttgtagtgaattaagatcgtattattgtattttagtttgggcgatagagcggagatttcgttttaaaaaaaaaaaaaaaaaaagatattagaaataataattttttgtttttttaagtgatgagttttgttaaagattaatttttaggtggaggcgggtggattacgaggttaggagatcgagattattttggttaatacggtgaattttcgtttttattaaaaatataaaaaatgagtcgggcgtggtggcgggcgtttgtcgttttagttatttcggaggttgaggtaggagaacggcgtgaatttaggaggcggagtttgtagtgagttgagatcgcgttattgtatttcggtttgggcgatagagcgagatttcgttttaaaaaaaaaaaaaaaaaaagttagtttttgttttgttgttttgttttgttagattaaatgaaagaaaatttattaatattttttgtaaaaaaatgttaaatgtattttttttagaagaattattatttataataattaaattgttgtaattgggcgcgttaattttgtataaaaaatgttgtgattttgttaaaaatttttttgtttgtttatagaaatgaaattttaatttttttattttgtaatgttgattttattttttggagttggtgtttttgggtgagatatttttaaatttggtgtttgaataaattttttttaaattagattttgatttttttaattatttaggtcgatagtatgcgtgatataatttggtttttataataattttatgaagtaggtattatgattattatgtttattttatagataaatatattaaagtaatagaaaggaagttatttttttattgttatatagatagtaggtggtagttaggattttaatgtagataatttaattgtagaatttatgtttttaatttttattttttataatttttaaatagggttttaataggatgagtatgtagatgtaaattaaaatttttaaatataatagaggtaaaatgtatagttggtaattattttttatgtttttttgtattttttaaatgttttttaataaatagtatttttgttattagaaaaaaaaattttgtttttgaaaattttttgttgattaggtatttttttttatgtttgtgttttattttttgtattagtgttgattaagtggtgatatagagaaaaaagttaaaatttagattgaaggtagggtaagatatagtaaagattaagagtatttatattattgtgtagtataaatttttataaaggttttaattgttttgttatttttaatagttttgaataagtgttataaatagtagatgtttattgattaatttttgttttaaagaatatatattaggatagaaataaaaagtaaattttttttatatgtgtttgtagattttagtagttgttaatatattgatttatttggtaaaaaggaattttttttaaaattatatattgtaattgttgtagtgttttattaacgagaaaaatgataatattaaatatgttgttaagtaaaattttaaaaaaatttggtatgattatagtttatagtagttttaagaaatgattttattaaatgtattaaatattgaaaatagatatgtataatattatatattatatgggattaaataaattgatttatgattttttttatttagtgaaatgttgtggggtttgtaagttaattaatgttagaggattaggtgatttatgttagaggaaatatattattaatattggttatagattttttggaaaaagtttttgttaattatttttaaaataatttttaaaaattaataattatttggtaaaatagtaaattatgtaagaaaagaaatatataaaaaacggtttttttttttttttgttttaagggaagttttttttttaggttgaaatgatatagttaagaattatttagatttaggtttttttaattataaagtttgtttatttggtagttttttaagttatttttttaggtagtttgaattagttaaattatatttttttagtttttcggagtttattgataattagttatgtggttttttaggaaataaaattttggttggaaatagtgaattatttttaggttatttttaatatggagagtggagtaggaaagtattggattgaggaggaggttaaagttttgttaagtgtttgggtagaaaaaaatatacgaaaataattttatggaatattaagaaataaaggaatatttatttatattgttaaaaggttgtaattattaggagtatatagagattggaaatagtgttgggttaagtataaaaattttaaatatgaatatagaatagttaaatatgtttataattttggagatagttttaaaattatgaagtttttttatgatttggatgtaattttgtagtatgaatttgttatataatttatagaggaagatgtaaatggtaggtatttggaaacgtttagtttaagtatagttttagagattattgaaggtaaaaaaaaaaaaaaaaaaaaaaaaaaaaagaaaagtatttttgttttttttttgttttatagttttatgaattgtaaaagtttaggatttttgtggttatatgataaatatagattgaaatattaagattgtggaaaaataattaatttattatgttattttgtataaggttaagaatttttttaaaaagaggttaaatattattattttaaaaaaatttgtaaaatatagaaaaagtatattataatggtattgattgttagtgttaattgtatgtgatatgtttttgaaatatggattgagttttaaaaatagtttaagttttaattttataagagtggtaaataaggggaaaaatattaaaaatattgtttaattgatgtttttttatagttttaaataagaatttttttttttatttaatttgcgtttttttaaatttataaataaaagtatatttaaaataattgttttatattattttattatttgtttataagaatagttttattttaataatgaagaagaatagttttattttaataatgaagtataatgaagatttagtatatgaaatgatttgagattaagtgatttataggggttttttgacgtgttgtgttgttaaatttaatattatttatatagaatttatttattgtttgtggaagtattagtaggtaaagggagggaaattaatgatagtaatgagatgtttattatagtttaaattttatagatgttattttaagagtagaattatttaaaaatttgtaatatttattatttgtgtgtattatgggtaaagtattaagttatatgcgtttagtaatgcgaaattttaaaaaggatagaattgtaaataaatttaatatttgagagaaaatagtaaatagtataataaaagtattaaatgtgaatggggttaagaggataaagattataattggttaatttaagttagttattttttatgtttatagtttagtaataaattattttattaaaagaagaatttattttgtttatattttttttatttttgagatgatattaaattttgagaaagttttgtagttattattatattaaatagtaatcgtattattttatttaattaaatattttcgattttttattatttaagtgttttaaatattgattaataaataagtaaattatttagtttttgaaagttttcgattttaattaggagttggtttgatgaagatgtgggtgttaatattttaattttttaaagggatttttagcgtttttaggtatttttttggttttaaattttttcgtttttatttataaatagagggattatttttataatataattatgtacgtttagttattttaaatttttaattttaaaattaaattttttatttttttattatttttttttttttttttagagagagggttttatttttgttatttaagttgaagtgtagtggtgtgattttggtttattgttgttttaatttttaggatttaaatgatttttttaatttagttttttgaatagttgggattatggggtgtgagttattatgtttggttaattttttgtgggatgggttttttattatgttgttttggttggttttgaatttttgggtttaagagatttttttgtttcggtttttcgaagtgaggtacgatttattatatttagtttgaatttgatttttttataaattgtttttattttagtattattatatttttaattatttatatagaaatatttgagatatttttgatttttggttagttattaagtttttaaaaaatttgttgatatattgtataaaattttttttttgttttatttttattatgattaattagaattttattatgttttatatggaatattaatgtaatttttttatcgggttttttagtttttattttttttttatatattttttataatattattagttgttttttatatttttaaattataaaattataagtatattaatattttggttgtattaaaaataatttttaaattatatcgtaagattaattatggtttaaaattaaatattataattaggagatttgaggacggtagatatgttttatagatgagtgggaatttcggatttttcggcgattatttcggtgggtgtaaattgtattatttttaatttgcgatagttataattatttttaaacggataatttgtttaagtatttttgcggttgtaaataaaaggttgtggtggttcgagcgcgcgcgcgaaaatttttagttgttgaaggatttggattgtcggtacgttatattagtttattataggagtacgtataggtttcgggagattagatatcgtttgtagtcggggaggagttttgatttagttagattaagtaaatcggcggtttacgaagttggttagtttttggatgcgtgtatatagtcggggggcggggagggagagagtttttaaaaggtataagtggttgggagggtgggtaggataggttaaagtttatggaagcgagtgtttttcgtgtacgtttaggtaatttaggtcgacgttataggtaggtattggtttaggtcggagaggtcggtttttcgggttttcgggacgtttatgagaacgtcgattgcgggaagttggtttcgagagatggagacgtacgttttcgttatttttattttgttgtttatcggtgttgtagttttacgagttttagagtgattatatgcggtatatttagttgcgtgggttatttttttgaggcgatgtattcgaatacgttatatttttttcggatttttaatttttttagttttatgtcgtcgtcgaaagtacgtggaaggatttgtcgttgcgcgtaaggtgtaagtattaattagttgttagttcggttcgtcgatttagaagttgcgttcgtataggtttttttttttcgagggtggttttagttattgcgttcggcgcgcgttgttttttaggtggcgtggtagtttagttttgttttttttttttcgagtttattaacgagcgagggcgtaggggcggtttcgcggttgaggggcggggttacggatgttgtagggtggagttagtttttttttaagagttgtttggaaagttgtatttgttgtacgtggaaattttcgttattttttagtatttaatagtagcgtaatgggagtaacggatttaattttattttttttttagagtatttagtttttatatgtttttttttgtatgttttttttaggtcgttaagatttggtacgttttaatttttgagtcgttttcgtagtcgagaaggggtcggggtatgcgagttttcgtagagtggggaggggtcgttagtgcgcgtatttttcgtttgttcgggtattgcgttagcggggcggttcggaggcggggtcgcgtttttgcgtttgcggcgggaagttagtggggcgttgtttcgttcgatattcgcgttttagttttcgtttatattttttcgggttaggcggttgtagcggattcgaaaagagtggcgtagggtcgcgcggtttcgttttttttttcgtttagcgaattttttgattattttttttttttagagttttgtttcgtttttcggcgcggtcgtagtttttagtttatttaggataatggcgatacgtgagggtgagtaatagggattcgggttttttacggtttttttgatttttaggtcgtgagttcgcggttacgtgcgagtcgcgaaattttgtttcgtttttttgtagtagcgtttttaggtagtcgcgcgtgcgtatacgtggtttaggcgttttcgggttttttcgaattttattgtttcggggatggggagaaggagtaaagtagaggagaacgagaaatggttaaggggtggaaaggtgtttggaagtattatttataattaatagttattgtaaaatataagtaaattagttttgattcgttaaaatttgagttttgttttgttcgtgaggttaatgatttttttaagaaggttaataattgaaatttttgaaagatttgtttagaggtcgggttggttggtttacgtttgtaattttagtattttgggaggttaaggcgggcggattatttgaggttagtagtacgagattagtttggttaatatggcgaaatttcgttttttattaaaaatataaaaaattagttggacgtggtggcgcgcgttcgtaatttttagttatttaggaggttgaggtaggagaatcgtttgaattcggaggcggaggttgtagtgagtcgagatcgcgttattgtattttagtttgggcgataaagcgagatttcgttttaaaaaagaaaaagaaaaatttgtttagggggcgtgtgtgtaagtagtttttgatgttatggtgtgtgtgtgtgtgtgtacgcgcgcgtgaagtagtttttgatgttacgatagtttggggtgtgtgtacgtgcgtgtgcgtgtttaagtagtttttgatgttatgggtgtgtatgtgtgtgcgcgcgcgtgttgaagtagtttgattttatgatggttggggaggggggttgtttttaggtagtttttgatgttatgatggtgtgtgtgtgtgtgtgtgtgtgtgtgtgtgtgtgtgtgtgttcgttttagtagtttttgatgttacgatggttttgaagaattttaaaatttttaggtaaaaaagttgtattattaggaaagattgtttttgttatttatgttggaaaaaaataaatgttggttttttttatatatttagttgttatatgtatagtgaggtaaattgtttttgtggttgttgggtatatttttttttatatagaaagtaattgaatttagattttaaaaagttgtagatttaggtcgggcgttgtggtttacgtttgtaatttttagtattttgggagttttaggcgggcggattacgaggttaggagatcgagattattttgattaatatggtgaaatttcggttttattaaaaatgtaaaaatttgttggacgtggtggcgtatgtttgtaattttagttattcgggaatttgaggtaggagaattatttgaatcggggagttagaggttgtagtgagtcgggatcgcgttattgtattttagtttggcgatagagagagattttgttttaaaaaaaaaaaaaaaaaaaaaaaaaagttgtagatttagtaaaaaagatttagatgatattgagtattaattttttagaattaaggtaaggattagaattttttttgtaattatggtatttgtatttttaaaatggtaaatttttaaaatttttgtttttttatttttttttatttgtgtatcgttggtaggttgattttttttaaatgttatttttatggtttttaaaaggtaaaagtggtaataaaggtaaaaatggtatttttagagatgttaaatttagtttgtttagtttgaaatttttttttatttaaattttgaatattgttattttttttatttttttagttttaattttgattttttttttttgtgaatttttagttatgttttagttaggttaatttattaaagtttgttttttattatatatattttatttatattattttttttagaatattgttggttaatggaaatataatgtaaatttgttttttataagttatattttaaaaagtaaaataataaaaaaaattggtgtaatgtgtttttatatatatatatatatatatatatatatatatgtttatttttgttttttgtttttagtttgtttcgtatagatatattatttcgcgttcgatatatttcgattattgaatttttagaggcgatgtttttatttttcggttttagtttttnttatattttattagttttttttnanttttttatttttnttttttaatttttnnntttatatttttatttagtttttttttaattttatttattatattttatatttttttttacgttatcgttcgtttttttaagtttttttaatgttttaatattttttaaattttatcgatttttttacgattttttttttatttttatttaattatttattatttcgttataatttttttttttatatttatttttttttttattatattttacgaaatttatttatttttttttattttttttaattttttatattatttttattattttatttcgttttatttaattatatattttataattatacgtttaattacgtatatcgtttatatttttatacggaaaacgttaatgttatgttatcgaaggcgagttagtattttatttttagagacgggatttaagtttggcgggcgagattttttttatcgaagtcggtagattgtatttttttttttttatagttttaattttgataaattattttagagaattcgtagttgtgtgttagttaggttaatttattagagtgcgtgttgtacgagatatattttatttatagtatgtgttttagaagagtgttggttaatggagatttaacggtaggaggtttattgtgcgcggtatttttaaaagaaaaataataaaaaaaattggagtaatgtgtatatatatatatatatatatatatatatatataaaaggttttttttgttgttgttttttgtttgttttgttttgtttttgaaatggagtttcgttttgtgtggtttaggttggagtgtagtggtaagattttagtttattgtattttttattttttaggtttaagtgatttttttgttttagttttttaagtagttgggattataggtatattttattatattcggttaatttttttttgtattttttagtagagttagggttttgttatgttggttaagttggttttaaatttttgattttaagtgatttgtttgttttagttttttaaagtgttgggattataggcgtgagtttattttaatatattttatttaattttatatatataaaatatattttaatatggagttaagatgaaaaattttttagatattttataattttttatatcgaatgtagtatatattttaataaatgatattttaatttgtaatagttatatttttagtggttgttttattggatagtagagttttagaatttttttattttttgtgtaaattttgtgtttttttagatttttaaattttaattttatgaattatttttagtttttattaatttttttagaatttatttataaatttgtagtaattattttggtatttgtagggtatgttacgtatggttgttttttatgttgtttttatttattaatttaaattttttttttttttaatgattaagtaatatagatttaattaaattaaggggaggggtattagatataaattttgttcgggtttattgtatattaatatatataaatgttaatttttttatttgatttgggtattgttttttttgtttttgtttttttttgagacggagttttattttttgtttaggttggagtgtagtggcgttattttagtttattgtaattttcgttttttaggtttaagcgatttttttgttttagttttttaagtagtaaggattataggcgtgtattaatatattcggttaatttttgtaattttagtagagataggattttattatgttggttagtttggttttgaatttttaattttaagtgattcgttcgtttcggttttttaaagtgttgggattataggtatgagttattgttttcggtttattgttttttattttttttttttttttattttttatgatgaatttttaaagttattattttaaatattttgtatttttgtttattattttttt

SEQ ID NO: 139 - DNA, 7004 bp, Artificial Sequence
  chemically treated genomic DNA (Homo sapiens)
gttgaggcgggaggattatttgagttggggaggttggggttgtggggagtcgagattgtgtttttgtattttagtttgggtaatagagtgagattttgttttaaaaaaataaataaataaaaaataaataaagtttttattttttttaggatttttattttttatattaatttattgttttagtttggaggggcgggattagtttcgagtcgtagttgatttttagagtatagagtataggacggaagtggttttgtatggggtatagtgaggttagggaatagtaatgtatttttgttcgtgagttttggttattaggttttggggtggttttatcgaatttttattttaagtttcgtttaatagaaatttaggaaatgggtcggagaggttgggagattatttaggagattagttcgaggtcgcgttttggatttttgagtttttatttttgtaattaagataataaatttgtgttggttgtgcgggtatatatttgttattttagtattttgggagattaaggcgggtagattatttgaggttaggagttcgagattagtttggttaatatagtgaaattttatttttattaaaaatataaaaattaggttgggtgtggtggtttataggtggattatagggtggtttgtaattttagtattttgggaggttaaggagggtagattataaggttaagagatcgagattattttggttaatatgttgaaatttcgtttttattaaaagtataaaaattagttgggtatggtggtgggcgtttgtagttttagttattcgggaggttgaggtaggagattcgtttgaatttaggaggcggaggttgtagtgagttgagattacgttattgtattttagtttgggcgatagagcgagacgtcgttttagaaaaagaaaaaaataaattaaataaaaaaataagaataaaaatataaaaattagttaggcgtggtggtaggtatttgtaattttaattatttaggaggttgacgtagaagaattatttgaattcgggaggtagaggttgtagtgagttaagattgcgttattgtattttagtttgggtaatagagtgaggttttattttttttaaaaaaaaaataaaaaaaaaggaaaaggaaaaataaatttatggaattgtttatggggaggagggacggtttggttttgttatttatgttgacgaagaagtaaattgaggtacggttttttttttttttattagaattgaaaggtgtttgaggttttagtaggttttttgtatgagattcggtggttttgagggttttagatgtttttattttttttttcgttttttttgttaggtttagagtattatttttaaaatggtaattagtaaattaacgtgattttcgtataaaggtaaggtgagtttgtttttcgtttattttgaattatttatgaaggaggtagttggtttgcgggttgggatgggagataggagaggagaaaagatagaggttgggttttgttcgttaaataaattaggtgtttacgggagtttttgggcgttttttcgcgttggcgttttgtatatgatagttgatttgtaaattgttgggtttttagttatggttattgttaggttagtttaggaaggatattggttttaggtgatttgggtgaggtggaggcggtggggggggtttttgggattaggtcgttattgtaaaaataaacggtttgtttgtatttgttatcgttttttaagttttaggtggtgggtggggttgaggggttgagaggtggttttaaagaaagataattatattttaaattttggaattcgtgaataaggttttatttggaatattagtttttgaaggtattattaagtgttttgagatgagattattttggagtttgtaggtagattttaaatttcgcgatatatattttattttttatttttatttttttttttgagatagcgtgttattttgttgtttaggttggagtatagtggcgtaatttaggtttattgtaattttcgtttttcgcgtttaagtgattttttcgttttagtttttcgagtagttgggattataggagtaaattattacgttcggtaaatttttgtatttttagtggaaacgggtttttattatgttggttaggatagttttaggttttttattttgtgattcgtttgtttcggttttttaaagtgttgggatgataggtgtttattttcgtttttgttttttagagatagagttttatttttgttgtttaggttggagtgtaatggcgtaatttcggtttattgtaattttcgtttttcgggtttaagtgatttttttgttttagttttttaaggagttgggattatagggtatgtattattacgtttggttaatttttgtatttttggtggagaggaggtttttttatgttggttaggttggtttcgaattttgattttaggtgatttatttatttcggtttgttagagtgttgggattataggtgtgagttattgtattcggttagatattgttttaaaaaaataaaaataaaaaaaggtattggataggtggttggttatgtggggtttgcggggtaagggatggttttgggtttatattttgagtaagataggaggtttggcggggttacgattagaagtgggttttaatacgatttcgaagggttagattggtgtttggaatttggtggtttttattgttgttagttgttatttagattttcggtcgtttttgtttgtttgtttttagggcggggtttattttaggtatttcgcgaatagatagaagcggttggttttggtggtgtgaggatgggggtttttaggggagtaaatttatagtaatatattgggttttttttagatttatcggatatttttgatgagtgattttggttgtagatggtttttggtgagttttcgttgatcgggtggttcgggttaaaggattttgtcgtgcgatgtttttatggagttcggcggttatttttaattcgggttggaattttttggtattagacgttcggcggggttttaaggtttttgggtttacgttaggtttcggtttgaaacgtagtattgttggaataaaatacgttagagaagtagggcgttaggttcgtttggatttggggaaacgagaattgttatgtttttttttttcgtaggttggtgttaatgaaaaattttttttttagtatggattaaatttcgttaattttatttagggagtagtgtttatttcgggtcgggaattgtttcggtttttaatcgtagtttttcgtgagggttttagtgtggagggtcggggttatttttttattttgggatggtttttaattcgttgatttggttttttcgttaggtatttttatagttttgttagattttttatgtgattagcgtttttgggaatattagtttagggtgttttttgttgttgggatggtggttcgggagggatttttttggtgattttgttgggtttggtttttagtttttttagtcgtaggttggtagtttcgaattgtacgagttttaggttatagtttttttagttgtaggttagtgggttagggattgtagggggttcgggttttagtttttttagttgtaggcgggtggtttgggttttagtttttttatttgtaggcgggcggttttggattgtatggagttcgggttttagtttttttagttgtaggcggatggtcgtggattgtgtgtggtttgggttttagtttttttcgttgtaggtagatggtcgtggattgtgtgtggttttggttttagtttttttagttgtaggcggatggtcgtggattgtgtgtggttcggattttagtttttttagttttaggcggttggtcgcggattgtgtaaagtttaggttttagtttttttagttgtaagcgggcggtcgtttattgtataaggtttaggttttagtttttttagttgtaggtgagaggtcgcggattgtataaggtttaggttttagtttttttagttgtaggcgggcggttaaggattgtaaggtttaggttttagtttttttatttgtaggcgggcggtcgcggattgtataaggtttaggttttagtttttttagttgtaggtgagaggtcgcggattgtataaggtttaggttttagtttttttagttgtaggcgggcggtcgtttattgtataaggtttaggttttagtttttttagttgtaggcgggcggtcgcggattgtataaggtttaggttttagtttttttagttgtaggtagtcggtcgcggattgtgcggggttcggattttagtttttttattttcgtagtcgggattcgttgtttcggggcgaataaagaacggtcgggggtgatttcggattatggcgcgttcgtagtatttgtggttattgtggaaatagttttggcgtgttcgggacgcgacgcggttttttttttttcgcgcgattatttagatgtgagcgtttagtttgaatcggattttttggttatgtgtttataattaatatggagttttgagggttttttgttcgattttaagatggcgatgcgattttttttgtttttacggtttaggcgggcgggttttgtttatttgtaagatggcggtagtttgggtaaagtacgtttttcgtcgtttgattcgttacgtatttatttttaagatggcgtttttcgtaaagttacgcgttagttgattggtttagacgtcgttacgtgattttattttttttttttttttcgattatataagtcgttttcgttttcggttttgaggaataatcgttttttttaataggcgtttgcgatttttttgggtttcgttttcgggcggttttttggttagtgggaggtgttggcgggggttcgcggggtttttttcgttttttggttgtagcgggagttaatgggtagcgcgcgcgggggacgtgtgcgggcgttttcgttattttgtgagtttataattcggagtcgttgggtcggtttttgttatttcggcgtttttatttcgtttttcgcgggtttgttttgtgtgttatggacgggtgagtcgtacgtcgtttcgcgttttatcgtttttttcgcgtcgtagttttgttttcgtcgtcgcgtcggttttttcggggtcgatttcgttttttttcgggcgggagggggcggcgggttttttttttttttttcgcgtggcgggcgcgggtgcggggcgggttaggggtttttcgggggtttggtcgcgtttttatttttcgttcggttcgttttcggttttcgcgcgtttcgtttttagcgtacgcggtttttcgcgttttttttttttcgcgcgcgttttcgtatttcgtttttgtttcgtttcggcggcgcgcggtttttttcgtttttcgttcggttttcgcgcgttcggatggtttttttcgtttttcgttcgtttttttcgtgcgtttgcgtagttcgtcgcgcgttttcgttggttttagcgcgcgtgcgcggtcgttatcgggggcgcgcgtttttttcgtcgttcggattttgttttcggcgtagtttcggaagcgtaggcggggttggggcggtcgtcgggagggaaagttggcgtcggggtttcgtcgcgggttcgagtttttgcgtttttcgttttatttttgtttttcgtgcgtttcgggtcgcggttaaggggtttcggtgatttcgggagagaagcggtcgtttcgagggtttgtttttcgtttcggggtcggaggggtttttttagggattttcgcgggcgtcgttatggggaggggttttttcggttttcgggtcggggtagttttttcgggcggttttgttgggcgggttttttttgggagaggtgggagttttttttagaaaggtcgtgtttcgtcgagcgttttttgcgcgaggttttttttgggaataggaagcgggagaggttggagatgtttcgtatttttttcgtttttttgagaagttttttttgggtttagttatttttaaaagtttgttaaacgtggttcgtgtagtttgtggtgttagaagaggcgtagttttagagtgggtttggattttttagtatgcgtgcgggtaggtgggttttgtagacggcgagacgagggtttttcgttttcggatttagtatcgcgggttcgggggtcgcgtattcgtttttcggagtgaggtaggaggttcggaggttgttttttcgacggacgtttcgagttatttagggtttcgtcgggagttgtagtggtcgggagaagtcgtggggagtttattgttgggttaggatttggtcggggttgaagggagggtttcggatagttcggttttttatttatttttttttcggggtgtttcgaggagggagagtcgggtcgggcggggttcgggttgattagtaattgaggttgtgttttggtcggtttgttaatttttattgacggtttttacggtcgttttttgtttttttcggtggatcgggttttattttgttgagaggtatttttttgggggtttatttttattcgggtggaagttttggtttaggtttgtgagtttgttagttttagttttttcgaggcgtttttaatttattggaaagtatatagtagtttttgaatttttttagcggtatttagtatttttcggggttttcgatgggggtgtttttgttttggaacgtgtggggtttggtttagaggtggggtttggggttttgttgggagggaggggcgttaaaggataatggtggtttttttttaagttgtagttaagtggacggtttatttttttgtttttttgagttttttttagcggggtttcgtgtagttagagggagttttgcggaggtggtagttgtagggatttacgggtttttttggttcggggatagttgggtgtttttgttgttgagtggttattaggttaacgttgttttttttttttttttttatagt

SEQ ID NO: 140 - DNA, 7004 bp, Artificial Sequence
  chemically treated genomic DNA (Homo sapiens)
gttgtagagagaaagaaaggagataacgttagtttggtggttatttagtagtaggagtatttagttgttttcgggttaggagagttcgtaggtttttgtagttgttattttcgtagggttttttttggttgtacgaggtttcgttagagaaagtttagaagggtagggaagtgagtcgtttatttgattgtaatttgaaaaggggttattattgttttttggcgttttttttttttagtaggattttaggttttatttttggattaggttttatacgttttaagataaagatatttttatcggaagtttcgaggaatgttagatgtcgttgagagggtttaagggttgttgtgtgttttttagtaagttggaaacgtttcggagaggttgaaattggtaaatttataggtttgggttagagtttttattcgggtaggggtgggtttttaagagggtgttttttagtagagtggagttcgatttatcgaggagagtaggaggcggtcgtggaaatcgttaataaaaattaatagatcgattagaatatagttttagttattgattaattcgagtttcgttcgattcgatttttttttttcgggatatttcggggggaaggtggatagaaagtcggattgttcgaggttttttttttagtttcggttaggttttgatttaatagtgagttttttacggtttttttcggttattgtaattttcggcgaggttttaagtgattcggagcgttcgtcggaagggtagttttcgggttttttgttttatttcgggaggcgagtgcgcggttttcgagttcgcggtgttgggttcgagagcggggagttttcgtttcgtcgtttgtaggatttatttgttcgtacgtatgttaaggggtttagatttattttagggttgcgttttttttgatattatagattgtacggattacgtttaatagatttttaaaagtgattgaatttaagaaaaattttttaggaaaacggaaagaatgcgaaatatttttagtttttttcgttttttatttttagggagggtttcgcgtaggaagcgttcggcgggatacggtttttttggagggggtttttattttttttaagggaagttcgtttagtaaagtcgttcggaaaggttgtttcggttcgagagtcgggaaggtttttttttatgacggcgttcgcgggggtttttggagaggttttttcggtttcggggcggaggatagattttcggggcggtcgtttttttttcgagattatcgaaattttttggtcgcggttcggggcgtacggggggtaggggtagggcggggagcgtagagattcgggttcgcggcgaggtttcggcgttagttttttttttcggcggtcgttttagtttcgtttgcgttttcggggttgcgtcgggggtagagttcgggcggcgggaaaggcgcgcgttttcgatggcggtcgcgtacgcgcgttggggttaacggggacgcgcgacgggttacgtaggcgtacgaggggagcggacgggaggcgggaagggttattcgggcgcgcgagggtcggacgggaagcgggaagggtcgcgcgtcgtcgaggcggggtaaaggcgaagtgcggggacgcgcgcggagggggaggggcgcgggaggtcgcgtgcgttagggacggggcgcgcgggggtcggaagcgggtcggacgggggatggggacgcggttagattttcgggaagtttttgattcgtttcgtattcgcgttcgttacgcggagaggaaggggagagttcgtcgttttttttcgttcgagagggggcgagatcggtttcggggaggtcggcgcggcggcgggggtagggttgcggcgcggggagggcggtggggcgcggggcgacgtgcgatttattcgtttatggtatatagagtagattcgcgggggacggagtggaggcgtcggaatagtaggaatcgatttaacggtttcgagttatagatttataaaatggcggagacgttcgtatacgtttttcgcgcgcgttgtttattggttttcgttgtagttagggggcggggagagtttcgcgggttttcgttagtattttttattggttagaaggtcgttcgggggcgggatttagagaaatcgtaggcgtttattgggggaggcggttattttttaaggtcgaaggcggaaacggtttgtgtagtcgggggagggggagaaaatgggattacgtgacggcgtttgagttagttagttggcgcgtggttttgcgggagacgttattttgagagtgggtacgtggcgagttaggcggcgggaagcgtgttttgtttaggttgtcgttattttgtaagtgggtaggattcgttcgtttgggtcgtgagggtaaagggagtcgtatcgttattttggagtcgggtaggaaatttttagggttttatgttggttgtgggtatatggttaaaaagttcgatttaaattgagcgtttatatttgggtgatcgcgcggggagggaaaggtcgcgtcgcgtttcggatacgttagggttgtttttatagtggttatagatattgcgggcgcgttatgattcggggttattttcgatcgttttttgttcgtttcggaatagcgaatttcgattgcggagatagggaaattgaggttcgggtttcgtatagttcgcggtcggttgtttatagttgggaaaattgaggtttggattttgtatagttcgcggtcgttcgtttatagttggggaaattgaggtttggattttatatagtaggcggtcgttcgtttatagttggggaaattgaggtttggattttgtatagttcgcggttttttatttatagttggggaaattgaggtttggattttgtatagttcgcggtcgttcgtttataggtggggaaattgaggtttggattttgtagtttttggtcgttcgtttatagttggggaaattgaggtttggattttgtatagttcgcggttttttatttatagttggggaaattgaggtttggattttgtatagtgggcggtcgttcgtttatagttggggaaattgaggtttggattttgtatagttcgcggttaatcgtttaaagttggggaagttgaggttcgggttatatatagtttacggttattcgtttatagttggggaaattgaggttaaagttatatatagtttacggttatttgtttatagcgggggaaattgaggtttaggttatatatagtttacggttattcgtttatagttggagaaattgaggttcgggttttatataatttaaggtcgttcgtttataggtggggaaattgaggtttaagttattcgtttatagttggggaaattgaggttcgagttttttatagtttttggtttattgatttatagttggggaaattgtggtttggagttcgtatagttcgaggttgttagtttacggttggggaaattgagggttaggtttagtagggttattaggagggtttttttcgggttattattttagtagtagaaaatattttaaattaatgtttttaggagcgttgattatatgaagagtttgatagagttgtgagggtgtttgacggggaggttaggttagcgggttgggagttattttagagtgaggggatgatttcggttttttatattgggatttttacgggaggttgcggttggaaatcggagtagttttcggttcggagtagatattgttttttaaatagaattagcgggatttagtttatgttgaaaagggggttttttattaatattaatttacggagggagaagatatgataattttcgtttttttaaatttaggcgagtttagcgttttgtttttttggcgtgttttattttagtagtgttgcgttttaggtcggggtttggcgtgggtttaggagttttggagtttcgtcgggcgtttggtgttagaggattttagttcggattaggggtggtcgtcgagttttatggaggtatcgtacggtaaggttttttggttcgaattattcggttaacggagatttattaagagttatttgtagttagggttatttattaggaatgttcggtggatttgggagaagtttagtgtgttattgtggatttgtttttttggagatttttatttttatattattagaattagtcgtttttgtttgttcgcggagtgtttgggatgggtttcgttttgaaagtagataggtaggggcggtcgggggtttgagtggtagttggtagtagtagagattattaggttttaagtattagtttaatttttcggaatcgtgttaaaatttatttttgatcgtggtttcgttaggttttttgttttgtttaaagtataaatttaaggttattttttatttcgtaagttttatatgattagttatttgtttagtatttttttttatttttatttttttaagatagtgtttggtcgggtgtaatggtttatatttgtaattttagtattttggtaggtcgaggtgagtggattatttgaggttagagttcgagattagtttggttaatatggagaaattttttttttattaaaaatataaaaattagttaggcgtggtggtgtatgttttataattttagttttttgggaggttgaggtaagagaattatttgaattcgggaggcggaggttgtagtgagtcgagattgcgttattgtattttagtttgggtaataggagtgaaattttgtttttaaaaaataaaaacgaaaataaatatttgttattttagtattttggaaggtcgaggtaggcggattataaggtgaagagtttgagattattttggttaatatggtgaaagttcgtttttattaaaaatataaaaatttgtcgggcgtggtggtttgtttttgtaattttagttattcgggagattgaggcgggagaattatttgaacgcgggaggcggaggttgtagtgagtttagattacgttattgtattttagtttgggtaatagagtgatacgttattttaaaaaaaaaagtaaaaataaaaaataaaatgtatgtcgcggaatttagggtttatttgtagattttaggatgattttattttaagatatttaatggtatttttaaagattggtgttttaaatgaagttttgtttacgggttttagggtttaggatgtggttgtttttttttggggttattttttagttttttagttttatttattatttgaagtttagagggcgatagtaggtataagtaggtcgtttgtttttgtaatggcggtttggttttaggaattttttttatcgtttttattttatttaggttatttgaaattagtgttttttttgggttggtttgatagtaattatggttgagggtttagtaatttataggttagttgttatatgtagaacgttagcgcgggaagacgtttaggggttttcgtgggtatttgatttatttagcgagtagggtttagtttttgttttttttttttttttgttttttattttagttcgtaggttagttgttttttttatgaatgatttagggtgagcgaggaataggtttattttgtttttgtgcgagaattacgttggtttgttggttattattttgaaaatgatattttgagtttggtaggagaaacgggggggggagtgaggatatttgaggtttttagagttatcgaattttatgtagagggtttgttggggttttagatattttttagttttgatgggggagggaagggtcgtgttttagtttattttttcgttaatatgagtggtagggttaggtcgttttttttttttatgagtagttttatagatttattttttttttttttttttttttgttttttttttgggggggatggaattttattttattgtttaggttggagtatagtggcgtaattttggtttattgtaatttttgtttttcgggtttaagtgatttttttgcgttagttttttgagtagttgggattataggtgtttgttattacgtttagttaatttttgtatttttatttttatttttttatttgatttatttttttttttttttgagacggcgtttcgttttgtcgtttaggttggagtgtaatggcgtgattttagtttattgtaattttcgttttttgggtttaagcgagttttttgttttagtttttcgagtagttgggattataggcgtttattattatgtttagttaatttttatatttttaatagagacggggttttagtatgttggttaggatggtttcgattttttgattttgtgatttgttttttttggttttttaaagtgttgggattataggttattttgtaatttatttgtgagttattatatttagtttaatttttgtatttttagtagagatggggttttattgtgttggttaggttggtttcgaatttttgattttaggtgatttgttcgttttggttttttaaagtgttgggatgataggtgtgtgttcgtatagttagtataggtttattattttaattataaaagtgagggtttagggatttagggcgcggtttcgggttggttttttgggtggttttttagttttttcggtttattttttggatttttgttgaacggagtttggagtgggggttcggtgaggttattttaaggtttgatggttaggatttacggataggaatgtattgttattttttggttttattatattttatgtagaattattttcgttttgtgttttgtgttttgggaattaattgcggttcgaggttggtttcgtttttttaagttgggatagtgggttggtataggaagtagagattttaaagggaatgggggttttatttattttttgtttatttatttttttgaggtagggttttattttgttgtttaggttggagtgtagaggtatagtttcggttttttatagttttaatttttttagtttaggtgattttttcgttttagt

SEQ ID NO: 141 - DNA, 14649 bp, Artificial Sequence
  chemically treated genomic DNA (Homo sapiens)
agaaggtttggaaattatcgttagattaatttaaaattataaagttttttagagtttatttattttttaagttatatgtttacgtgtaagtgtgtatttatttaaagacgtaagtgattaattttttttaatatataattaaggtttgagttttgaagatttttttttggagttttagtaaatttatttaatttaattggtttagatgttggggtgatttttttttttttgagacggagttttattttgttttttaggttggggtttaatggcgtaattttagtttattgtaagttttttttcggtgtcggggtgattatttttattttgtttttcgttaagttatagaggtttggggagtttttttagatttttaataaatttgtttgtggagatttggggagtttttttagattcgtaataaaattggtttaattttaaatgggttttgttgagaattttttcgttatgggttgggtgcggtggtttatgtttgtaatttaaatattttgggaagttaaggtgggtggattacgaggttaagagatcgagattagtttggttaatatggtgaaagtttatttttattaaaaatataaaaattagtcgggcgtggttatgtatgtttgtaattttagttatttaggaggttgaggtaggagaattatttgaatttgggaggtagaggttgtagcgagttaagattttgttgttatattttagtttgggtgatagaggaagattttattttaaaaaaaaaaaaaaatttttttattattttgttatgttttaaggtttaggataggtttaggtaaaagttttgatggttttttgttatattttagtttttgtataagggtattggtttttagtatttaattttatttagtaattattgaaatagttgttatgaaagtttgtattagtgagatttggtttgttataggaggttgtagtgagttgagattttgttattgtattttagtttgggtggtagtgtgagattttgttttaaaaaagaaaaatgatgtagaaagatttgtttgatatagggtgggtataaatttttaatttgtaaaaaatatagtatttgtgaagtataataaaatgtagtgcgataaaatgaggtatgtttggatagtaaaatattatgttgtatttagtaaatgtatataatttttatttgtgaattatattttaataaagttggataaatgaattgtatttgtaatatggtagggaatatatgatattggatattaatgtaaatggaatttttagtgttttggtgaaaatgttatattattgaataaaaaaaaaatgtagtgtaaaatgaagtaaaatgtgaaaatttttaataaatgtagaaatatgaattgtttatttaaaagagaaaagttttttgagttttttaagaagattttttttttggatgttgggcgcggtggatgtcgggtatttgtattcgagtattttgggaggtcgaggtagatggattattggaggttaggagtttaagattagtttgtttaatacggtgaaatttcgtttttattaaaaatataataataattcgggtgtgatggtatgtatttgtaattttagttatttaggaggttgaggtataagaattgtttgaatttgggaggtagaggttgtagtgagtcgagattgtgttattgtagtttaatttggattatagagtgaaatttcgttttaaaaaaaaaaaaaaaagaaagaaggaaaaagaaggttttttttttgggtattttttttcgatatatttaatataaatggattaatgatattatttttattaggtgagtatgtttgggtaagttgttttagtgtttatttttttggttttttttttttttttttttttttggagatagggtttttttttgttatttaagttggagtgtagtggagtgaatatagtttattgtagtttttaatatttagttttaagagatttttttgttttagttttttaaatagttgggattattggtaggtattattatgtttggttagtttttaatttttttttttttgtaagtatagggtgttgttatgttgtttaggtaggttttgaattattgggtttaagtgatttttttattttagttttttaaagttttggattataggtatgagttatggtgtttggttgttttttgttttttttatttgtaaaaattgaggataataatagtatttttataaagttggtggaagaatgatattaatataaatgaagtgttaatagaaagagttttggaatatagtaagtatttgttagttatggttattgttattaatatattttttaaggtaaatttgtggttttatttattatttgagatatatgatttttaagtttattagatttttttttttggtttttatttttaaattaattaaatattattattattattattttgagatagagtttgttttgttgtttaggttagagtgtattggtacgattttagtttattgtaatttttattttttaggtttaagtaatttaggtgttttagttatttaaagaagttgggattataggtatgtattattatatttagttaatttttgtatttttagtagagatagggttttaatacgttggttaggttggttttgaatttttggttttaagtaattagtttatttgggttttttagtgtgttgggattataggcgtgagttatcgtgtttggtttttttttcgttttagagataggaattttatttttttttataggttggagtgtaaaggtatgaatataatttattgtagtttttaattttgggttaaagggatgtttttttttttgtttttggagtagttgggttttagaattgtgtcgtaattattgatttttattaagatttttgttttattattttatttttttattaggttatttttatatggatatataaatggtattttaagtgaaagaaattaattatttaaaataggattttttattttaaattagattttttttatatgttatttttgttaatgtgggttatatatattggtaagtttagaattatttttttttttttttttatttatatttaatattgttgaaataaaataaaatgttgtttttttttttttagaaaggtaatatttgtttattatattaaaatttagaaaatatggaaaaataaaaaggataaaaaattatttataattaaaatagtttaaatttttagttaaaaatgttaacgtatttgatatttgtttatataatttagattgtaatgtttatataaatgtgagtttttaaaatttaaaaggtttttattattaaaaatgttttgttaaattttgttttaaaagtaagattttaatatttaaatttttaaaatagatatttttgaagatttggaaaatatagacggtttaaaatttttatattattattgttaaattttggtatgttttgttattttgttagtgaaatatatatagatttgggggggttatttttttttttttttttttttttttttgagataagggttttattttggtgtttaggatggaatgtagtggcgttattatagtttattgtaatttggaatttttggattcgagggattttttcgtttcgattttttaaagtgttggggttattagtttaagttattgtgttaggcgaatggttatttttatatatatagttgatttttgaataatatgggtttgaattgtttgggttcgtttataagtcgatagaaaatatagtattggaggggtttgtatatagagaggtttgattttttttttaagtgttttattcgtaggattgattgcgggatttgagaatgcgcggattttttttttttttttttttttttaggaagttttattttcgtttaggtttgagtgtagtggcgcgattttagtttattgtaattttcgttttttagttttaagcgattttcgtgttttagtttttcgagtagttgggattataggggtttatttttacgtttaggtaattttttgtatttttagtagagatgggttttcgttatgttggttaggttggtttcgaatttttgattttaggtgattcgttcgtttcggttttttaaagtgttgggattataggcgtgaattatagcgttcggcggaatgcgtggattttggtataagacggtggttttggaattaatttttcgtcgagatgattgtttaaaaaattgtaattgtttaaaatttaatatttgtggttttttttattatgtagttttaaatttttttttttttttttttttaaatttagacggagtttttttttgtcgtttagacggcgtaatttcggtttattgtaattttcgtttttcgggtttaagcgatttttttgttttagttttcggagtagttgggattataggcgttcgatattacggtcggttaattttttgtatttttggtagagatggggtttttttgtgttagttaggatggtttcgattttttgattttatgattcgttcgtcgtggttttttaaagtgttgggattataggcgtgagttattacgtttggtttttatttaataagatatgaatttaaaaatgtatgttttagtatttatatatgttcgatgtaacgtatttaattagttatttttagaaattttgttttaatttatacgtttattaaattggtttgagtgtttttttttttttaatgtattgcgtatttataatttagaataagtgattaaaacgtttaagagtttattacgtaaattgttatttgttggaaatttacgttttaggttgtggatattggcggtcgaaatttgatttcggtttgttaagatatttttagagtacgcggcgttgttaagagtttggtcgagtgtagttcgagcgtcgacgtcgttaacgtggcgtatattgttgacgtagtacgtaagttcgttatagtggtttttcgtcggttgcgtcgtaagttcgttatagtggtttttcgtcggttacggcgttgcgttattggtttgtaggcgttttttttttggaagtggcgattgttgcgggtttgagcgttggttttacgcgtttcgggagttaggttggcggcgcgatgaggcgtagtaaggttgacgtggagcggtatatcgtttcggtgtagggttttatttcgtcgtttcgataggtgagtgggtttcgaagagatcgacggtttcgatttggtcgggcggcggttcgcgttgtttaggcgttatggttttcgacggcgttgttttttggcgcgttttgttgaggcgtcggtcgttggcgtagttttgtgggcggcgtggttttgtaagcgtatgaagagttttggggggatagcggtgggcgggagatttttggcgtcggcgttttttttttttttcggtttgttttcgacgtttgttttcgacggtgttcgtttttgggtatttttggttcgggttttttggtcgatcgcgtatttcgtagtattcgcgcggtttagttttcgggggtttgggtattcgggtgttgtatcggcgggtttttttttattttttggatatatattttatatgttgcggcggaggtcgtatttttttggtttggaggaatttagtggggattgacgtagtttcgggtgagttttggcggttgcgtcgagtgataaggtaggtattttagcgcggatatttgtaatggttcgacggcgtaaatgatattgaaagtttttttgttttgagtatgaggtgtttgtcgttgtttttttgtaagggtttagttttatttcgttttttatatttatttttttcgttttttttttcgttcggaatattttggtagttgtttttgtttaaaaaaaaaaaattttaaagtttttataaatcgttagtatggtttgtaatttttaattttttttataaatgttttaagggtattttttttttttatatgtaaataatgtgatttattttggatttaataagattttagtaattggatttaaagagtgacggaagaagttattaaaggtggatgtgcgtagaattttgagttagtttgttttggtttgaataattatagtattgtcgtttataagttgggtatttggggttagttatattttttatttatagatggagttgtaatattaatagaatttgataggatgatttattttaaatatttagggtattgtttgatatatagtattaaatgttagttataagttattttttattgttgatgttaaaaggatattggcggggcgtagtggtttacgtttgtaattttattattttgggaggtcgaggagggcggattgtttgaggttaggagttcgtgattagtttggttaatatgttgatatttcgtttttattaaaaatataaaaaaagttagtcgggcgtggtggcgtatgtttgtagttttagttattcgggaggttgaggtaggagagtcgtttgaattcgggaggcggaggttttagtgagtcgagatcgcgttattgtattttagtttgggcgatagagggagattttaaaaaaataaaaataaaaataaaaaaaattcggaaatttacggatgattatgattataatagtagtataattgtgttttttatcgtaattaagtataggttattttattttgcgtttttagtagttttgtggatattgagatttgtagagatttaagatatttgtttagggttaaatagatagtgtagtagaattttggtagtgggtttgatttagttttttttgggaatagtggagtaagttatagtttatttttttagaggaggaggatagatatttatttgtatattgtaattttaaattgttagtatagtataaatatgaatgtgatgatagagtttaaaatagattttaattgagggtttttgtaatttttgaaattaaagattttaatttttgtgttattttattttttttgaggtggggttttattttgttatttagttggatgtagtggcgttatttcgatttattgtatttttcgtttttttagtttaagcgatgtttttattttagtttttcgagtagttgggattataggtgtatttattatattcgttgttttgttttgttttgtatttttggtagagattgggttttattatgttgtttaggttgtttttgaatttttgggtttaagtgattttttcgtttttattttttaaagtgttgggattataggcgtgagttattgtatcggttattattttatttttgagataaggtttttttttgttttttaggttggagtgttgtggcgggatcgtggtttattgtagcgttgacgttttgggtttaatttatttttttattttagttttttgggtagttgagattataggtatgtgttattatgttcggtttttttttttaatgtagagacggggttttattatgttatttaggttggtttttaatttttgggtttaagtgattttttcgttttggttttaagtgttgagattataggtgtgagttattttgtttagtttgatttttttttttttaaataagtttaaaaaaaaaaaaaagtaagtttagagtttttttgagatttttagtggggattttggtttttaaaagattaaaaattattggtttagatagaagttagaatgtttttttaattatataatttttttattaaataaagtggagtggtggtagaattttgaggattggttattatgatattttttttatatttagagtttttttttttttttaaatttaaagttatttatattagaatttggggattttagcggaatatggattaattagtgagtaattttggaatatgtgaagttattttgtaaagttaggtttgagtgaaatgataaaatagggtgttttggatagaaggtaaagaatggagggagaagaggtagtggttgtgaagaatatgaagaggttagtatttttttttagtttggtagaggttggttatttgtgaattgtttatgttttttagaatgtcggagttttggagtgtgatgatgcgtttgtatattatatttttttagttttttattgtgtttttatttgttagtttttttttgttttgttatttttttatttttttatatgtgtttttgtttttaaaaatatttttcgtttgtaatttgagtattttgggaggtcgagagattagtttgattaatatggtgaaaattcgtttttattaaaaatataaaaatgagtcgggcgtggtggtagcgtttgtagttttatttattcggtaggttgagataggagaattgtttgaattttggaggtagaggttgtggtgagtagagattgtattattgtattttagtttgtgtgatagagcgagattttgtttttaaaaaagaaaaaaagaaaaaaaaatataattttttttttagtttttttttttttagatggtttttgtttagtttttttatgttttgttaagttgattttttattttgtagttgatttttattttttaaagtttatttgatagtttttatttttatttatttgttttttagaatagggttttgttgtgttgtttaggttgttattaaatttttgggcgtaaatgatttatttatttttgttttttgagtatttaggattataggtaggtatttttgatagttgttagttgttttttttgttttttatagttatattttatatttttgagtaatatatatatatatttttgttatttttaatttttttttttttattttagatatttttttttttttttttttttttttgagacggagattcgttttatcgtttaggttggagtgtagtggcgcgatttcggtttattgtaaattttgtttttcgggtttatattatttttttgttttagtttgtagttgggattataggtattcgttattatattcggttaattttttagtatttttagtagagacggggttttatcgtgttagttaggatagtttcgattttttgattttatgattcgttcgttttagttttttaaagtgtcggggttataggcgtgagttatcgcgtcgggttttattttagatattttgtattggttattatgtttttttaaaattgtttttagatattttggtttgttttttatttttttagtattgttattgtagtttttgtttaaatgaatatttaatatttatataaatataaggtaaatatttttgtatttgaattgtttttgttgtgcggttttgttttttttggattgaataattgttttattttttggtttgtttgtatgttgtgttattatttgtttatttaaatttagtaatttatatttttaaatgtggttaaattggttatataattttattaattgtagtttaaaatattgattgattgattgattgattgattgtttgtttatttggaatatttttattaattgatttttttaattaggattggtttttttttttttttgttatatagttgtgtttttgggatttttttttattattagtttgagaattttttttattttttttttgagttagattttttgttttttgtattttatgttttttttatttattttttttgttttggtgtagtatagttttatttgttttgaggaaaagtagatgagaggtttttttgtttgtttgtttttgttttgggatagagttttgttttgttgtttaggttggagtgtagtggtatggttttagtttattgtaattttcgtttttcgggtttaagcgatttttttgttttagttttttgagtagtgggattataggtgtgtgttattatgttcggttaattttttttatttttagtagagatgggattttattatgttggttaggttggttttgaaattaatggtatgtttttaaaatgtttttatttaatttagttgattatttggttatcgaattttgagtttgaaataatttttttttcgtaattttgaaagtattgttttattttttagaagttttgttgttaggagttcgatgagatttttgtttttggtaatttaaaggttttttggaagtgtttttttaattgggaaatttattttttttagttttgtagtattttttgtattatttttttgattattttttattttttttttaatgacgtttatttgaaagttggagtttttttaattttttttttattttttttttttgtttgttttgttttttgagagatttttttatttttatgttttaggggaagaagattggggaatttatggtttagtatttagatttttttttattgttttgtataatcgcggtttttatttttgttgggattttatagatttggagttgattagatgggtttgttgagaatagttgattagatgggtttttggaggattttagggggagggagatttatttgattgtgtaagatgggcgatagagtgagattttatttgaattaaaaaaaaaatttagaattgtatagtgaaaaagtaggttataaatattaagttttggataattataattatatttttattttattgtgtaagatagagatgatgtggtattttttagggttttattgtttttgtttttagttttgtattagtttttgatatttggtagtttaagtgaatttaggtatttgtttatagtgatatttgttgttatgtaaagaagtattgtttgtattagatattgttttgtttatataatatgggttgtgtttttttttagttgtgtatttttaaataaggtatttatttgtttgagttttagtttttttgtaaagtgagtaggttagaggtaaaagattatatagaagaataatttgtaaagttgtttaattattttaagattgtttattttaataatatagttggaagtaaagaaggtaatggaattatttttttattatgttttggtattgtattttgaatttatttttttattttgaaaagggggaattggttgggtttaatggttgacgtttgtaattttagtattttgggaggtggaggaagttagattataaggttaagagatcgagattattttggttaatatggtgaaattttatttttattaaaaatataaaaattagttgggtatggtggcgtgcgtttgtagttttagtttgtattcgggaggtagaggttgtagtgagttgagatcgagttattgtattgtagtttggcgatagagtaagattttattttaaaaaaaaaaaggaaggggggaataagttttgtttttttacgtgttgttttgattgttgtgtattatttttgttaagattgttgtagttttttttttttttgagacggaggtttgttttgtcgttagtgttgggattgtaggtgttagtttggtattgagtaacgttttgtaatttaagtatataagttttttatttttttgtttatatttatttttaggtattttttttttttagatgcgattgtaaatggaattgtttttttaatttttttttttgattgttcgttgttggtatagtagtttttttttatttatagtattgttttacgtggttttatttagttgtgttattcgtggtttaaaaatattgaatggaagattatataaataaatattttatgagttttaaattgtaaacggttttgaataatatggtaaaaattttacggttttttgtttcgttttatttaggatataagttatttttttgttcgatatatttatgttgtatgtgttcgttattcgttagttatatattagttattttagttattagattagttgttggagtattgtagtgtttgtgtttaagtaatttttattttatttaaaatggtattaaagagtaagagtagcgatgttggtagtttatatatgtagagagaagttatatagtgttttttttaagtgaagaggtgagtttttttgtttttttttttttttggtttaaataatagaaatttatttttttatggttttggaggttagaagcggtagattagggtgttgttgttttggtttttgatgagggttttttttttggtttataggttggttggtattttgtttttatatggtagagggagagtattgtagttttattttgttttttattattattatttttttaatttatttttttattgataatttttgggtgttttttatagagggggatttggtagggttatgggataatagtggagggaaggttagtagataaataagtgaataaaggtttttggtttttttaggtagaggattttgtagtttttcgtagtgtttgtgtttttgattatttgagattagggagtggtgatgatttttaacgagtatgttgtttttaagtatttgtttaataaagtatattttgtatcgtttttaatttatttaattttgggtggatatagtatatgttttagagagtatagggttgggggtaaggttatagattaataagattttaaggtagaagaattttttttagtgtagaataaaatgaaaagttttttatgtttatttttttttatatagatacggtaattattcgattttttaattttttttttatttttttcgtttttttattttataaaatcgttattgttattatggttcgtttttaatgagttgttgagtatattttttagacggggtggtggtcgggtagaggggttttttattttttagtaggggcggtcgggtagaggcgttttttagaagaggtgagtttttgatttaggaaagaaaaaagattatatattggagttgttaagatttatggtaagaataaattttttgtttatgaaattgtgaagaaggaaaaagaaatttgtgttagttttgttgtgatattttaaattgtaaaagttatagttatagtgtgtgataagtgtttagttgagatggataagatattaaatttgtgggtggaggatataaataggaaatatgtttcgattgacggtaatttggtttgatattatttatcgttttggatatttattggggttttggaattttaaaaataagatgtttgagtagttgtatattttttattatatggatggaatatattttggttgtattagtattttttttttttttttttttgagatggaattattttgttgtttacgttggagtgtagtggtgcgattttggtttattgtagtttttgtttttcggatttaagcgattttttgttttagttttttaagtagtggggattataggggtgtgttattatgtttagttaatttttgtatttttagtagaaaggaggtttttgtatgttggttaggttggtttcgaatttttggttttaggtgattcgttcgtttcggttttcgaaagtgttgggattataggtgtgagttatcgtatttagtttggtgtgtattagtattttggattttggagtttatgtaattaaggagttaggttgtggatttcgtttattatttgaagaatttaatatttatttttgtttttttgattttttgattgtaaaatattgatttgatttgtagagagaatagtatatggattagggaatttttagtgttttaatagattttaagtatttatttatttttttttatagaggtttatatatggtaggaaaagagatttttggaatattttttttttttaaagaaagttggttttttttgtttgttaagtgagagagtggtattatagggtttttaagatttttaaggttgatgaaaatttttttgttgtttgtttgttttatttttttgaatttattttttgtatgttatgtatttattatttagagagaggatttttttgtgttatttacgttggagtgtagtgttatagttataatttacggtagtgttaattttttgggtttaagtgattttttttttttggttttttgagtagttaggaatataggtatgttttattatgtttggttatttttttttttttggagataggattttgttgtgttgtataggttggttttaaatttttggttttaaagttagttttttattttggtttttgaaagtgttagaattaaaggtgtgattaattgtatttagtttatttatgatgatgatgatgatgatgatgatgatgatgatgatgatgatgtttgggagatggagtttcgttttgtcgtttaggttggagtgtaatggtacgattttagtttattgtaatttttggtttattgtaatttttattttttgggtttaattgattttcgtgttttagtttttcgagtagttggggttataggtatttattattatgtttggttaatttttgtatttttgttaagacggggttttattatgttagttaggttggttttaaatttttgattttaggtgattcgtttatttcggttttttaaagtgttgggattataggtatgagtcgttgtatttagttttattttttgttttgtgataggaaattataaaatatggaattatgtatttgttagtttttaaaaaaatttttaagtgaatgaaagtggcgtatttgaatattaatttaggatagatttttattatttttgaaaaaatgttggaaaatatttttgtatgaaaagtaaaataatttttaattttttttaga

SEQ ID NO: 142 - DNA, 14649 bp, Artificial Sequence
  chemically treated genomic DNA (Homo sapiens)
tttaaaaaaaattaaaagttgttttattttttatatagaaatattttttaatatttttttaaaagtagtaaaaatttgttttaagttgatgtttaaatacgttatttttatttatttaaaagtttttttaaaggttgataaatgtataattttatgttttataattttttattataaaataaaaaatagagttgggtgtagcggtttatgtttgtaattttagtattttgggaggtcgaagtgggcggattatttgaggttaggagtttgagattagtttggttaatatggtgaaatttcgttttgataaaaatataaaaattagttaggtatgatggtgggtgtttgtaattttagttattcgggaggttaaggtacgagaattagttgaatttaggaggtggaggttgtagtgagttagaggttgtagtgagttgagatcgtgttattgtattttagtttgggcgatagagcgagattttattttttaaatattattattattattattattattattattattattattattataaataagttgggtgtagttggttatatttttaattttagtatttttagagattaaggtgggaggttagttttgaggttaagagtttgaaattagtttgtgtaatataataagattttgtttttagggagaaaaaaatagttaggtatagtggagtatgtttgtgtttttagttatttaggaggttaaggaaggagaattatttgagtttaggaggttgatattgtcgtgagttatgattgtgatattgtattttagcgtgggtgatatagggagattttttttttaaataataaatatataatatataaaaaataaatttaagaaagtaagataagtagataatagaagaatttttattagttttggaaattttggaaattttgtggtattatttttttatttaataaataaaagaaattagttttttttggggaggaaaggtattttagaaatttttttttttattatgtgtaagtttttatgggaaagaataagtaagtatttaggatttattaaggtattgaggattttttggtttatgtattgttttttttatagattagattagtattttatagttaaggagttaaaaaggtagaaataaatattgaattttttaagtaataaacgaggtttatagtttggttttttggttatataaattttaaagtttaaaatgttgatgtatattaggttgggtgcggtggtttatatttgtaattttagtattttcggagatcgaggcgggcggattatttgaagttaagagttcgagattagtttggttaatatgtagaaattttttttttattaaaaatataaaaattagttgggtatggtggtatatttttgtaatttttattgtttgggaggttgaggtaaagaatcgtttgaattcgggaggtagaggttgtagtgggttaagatcgtattattgtattttagcgtgggtaatagaatgattttattttaaaaaaaaaaaaaaaaaaaatgttgatataattagagtatgttttatttatgtgataaagagtatatagttatttaaatattttatttttgaaattttaagattttagtgaatgtttaaaacgatgaatagtattaaattaggttgtcgttaatcgaaatatgttttttgtttgtgttttttatttataaatttaatgttttgtttattttaattaagtatttattatatattatggttgtaatttttgtagtttggggtgttataataaaattagtataaatttttttttttttttttataattttatggataaaagatttgtttttattatagattttagtaattttagtatatgatttttttttttttttaagttaaaaatttattttttttgaggggcgtttttgttcggtcgtttttattgggaagtgaggagtttttttgttcggttattatttcgtttgggaggtgtatttaatagtttattgagaacgggttatgatgataatggcggttttgtggaatagaaaggcgggaaaggtggggaaaagattgagaaatcggatggttgtcgtgtttgtgtagaaagaagtagatatgggagattttttattttgttttgtattaagaaaaatttttttgttttgggattttgttgatttgtgattttatttttaattttgtgttttttgaaatatgtgttgtgtttatttagggttaaatggattaagggcggtgtaagatgtgttttgttaaatagatgtttgaaggtagtatgttcgttaagagttattattattttttaattttaagtaattagggatataaatattgcggaaggttgtagggttttttgtttaggaaaattagagatttttgtttatttgtttatttgttgattttttttttattattgttttatgattttgttaaatttttttttgtgagaaatatttaagaattattaataaaaaaataaattaaaaaaataataataataaaaagtaaggtgagattatagtattttttttttgttatgtgaggataagatgttagttaatttataagttaggaagaaagtttttattaggaattaaagtagtagtattttgatttgtcgtttttagtttttagaattatgagaaaataaatttttgttgtttaagttaaaaaaaaaaaaaaataaaaaaatttatttttttatttaaaggaagtattatatggtttttttttgtatatgtgaattgttagtatcgttatttttgttttttggtgttattttaaataaaataaaggttatttgaatataagtattgtaatattttaataattgatttgataattgagatgattagtatgtaattagcgggtggcgagtatatatagtatgaatatgtcggataaagggatgatttgtgttttaggtaggacggagtaggaggtcgtgagatttttattatgttatttagaatcgtttgtaatttaaaatttatgaaatgtttatttatataattttttatttaatatttttggattacgggtgatatagttaagtaaaattacgtaaggtaatattgtggataagaagggattattgtattagtaacgaataattagaaaaggaaattaagaaagtaattttatttataatcgtatttaaaagaaaaaaatgtttgggaataaatgtaaataaggaggtgagagatttgtatgtttaaattataaaacgttgtttaatgttaggttaatatttgtaattttagtattggcgatagagtaagttttcgttttaaaaaaaaaaagaattatagtaattttaataaaaataatatatagtagttaggatagtacgtaaaggaataaggtttgtttttttttttttttttttttttgagatggagttttgttttgtcgttaggttgtagtgtagtggttcgattttagtttattgtaatttttgtttttcgggtataagttgggattataggcgtacgttattatgtttagttaatttttgtatttttagtagagatggggttttattatgttggttaagatggtttcgattttttgattttgtgatttgattttttttattttttaaagtgttgggattataggcgttagttattgagtttagttagttttttttttttaaaatgaagaaatagatttaaggtataatgttaaaatataatagaaaaataattttattattttttttgtttttaattatgttattaaagtagataattttaagataattaaataattttataaattatttttttatatgattttttgtttttaatttgtttattttataagggaattgaagtttaagtaggtaaatgttttgtttaaagatatatagttaggaaggagtatagtttatgttatgtaaataggataatatttgatgtaagtagtatttttttatatgatagtagatgttattataagtaaatatttgaatttatttaagttgttaaatattaagaattgatgtagggttgaaaataggaatagtaagattttaagagatgttatattatttttattttgtatagtaagatagagatgtaattgtaattgtttaaaatttaatatttgtggtttatttttttattatgtagttttaaattttttttttaatttagatggagttttattttgtcgtttattttgtatagttaaatgaatttttttttttttaaaattttttaaaaatttatttgattagttgtttttaataaatttatttgattagttttaaatttgtggagttttaataagggtgaaggtcgcgattatataggataatgaggaaaagtttagatattgaattatgagttttttaattttttttttttggaatataagggtaaggaaattttttaaaaggtagaataaataaaagaggagaataagagaaaaattagagaaattttagtttttaggtaaacgttattaaaaaaagggtaagaaatggttaaagaaataatataagaaatgttatagaattgaaagaaatgagttttttaattgaaaggatatttttagaaaatttttaagttattaagaataagaattttatcggatttttaataatagaatttttagaaaatggagtaatgtttttaaaattgcgaaaaaaaaattattttaaatttagaattcgataattaaatgattaattaaattaagtaaagatattttaaagatatattattagttttaagattagtttgattaatatggtgaaattttatttttattaaaaatagaaaaaattagtcgggtatggtggtatatatttgtaattttattatttaggaggttgaggtaggagaatcgtttgaattcgggaggcggaagttgtagtgagttgagattatgttattgtattttagtttgggtaatagagtaagattttgttttaaaataaaaataaataaataaaaaaattttttatttatttttttttaaagtaagtgagattatgttatattaaaataaagaaagtaaatgaagaggatatgagatataagaaataaagggtttaatttagaaaaaagatgaaaggaatttttaaattgatgataaagggaagttttaagagtatagttgtgtagtaaagaggaagaaaaattaattttggttggagaagttagttagtaagggtattttaggtagatagataattaattaattaattaattaattaatgttttaagttgtaattgatgggattatgtgattagtttgattatatttgagggtgtaaattgttgagtttaagtaagtaagtagtaatataatatataagtaaattaaaaaataaagtaattatttagtttaggaaaaataaaatcgtataataagggtaatttaaatgtaaaaatatttattttatatttatataaatgttaaatatttatttaaataaaaattgtaataatagtattgaaagaatgaggggtaaattaaagtgtttgaggatagttttggaggagtataataattagtatagaatgtttaaaatggggttcggcgcggtggtttacgtttgtaatttcggtattttgggaggttgaggcgggcggattatgaggttaggagatcgagattattttggttaatacggtgaaatttcgtttttattaaaaatattaaaaaattagtcgggtgtggtggcgggtgtttgtagttttagttataggttggggtaggagaatggtgtgaattcgggaggtagagtttgtagtgagtcgagatcgcgttattgtattttagtttggacgatagagcgagttttcgttttaaaaaaaaaaaaaaagaaaagaaaatgtttaaaatgggagaaaggaaattaaaaataataaaagtatatatgtgtgttatttagaagtatgaagtatagttgtaaagggtagaaaaaataattaatagttgttaaaggtgtttgtttgtagttttaagtatttaggaaatagaggtaggtggattatttacgtttaaaaatttgatggtagtttgggtaatatagtaagattttattttaaaaaataaataaataaaaataagagttgttaagtagattttgagaagtaggaattagttgtagaataagaaattaatttgatagaatatagaaaaattaaatagaagttatttggaaaaagaaaaattagagaaagaattatattttttttttttttttttttttttggagatagagtttcgttttgttatataggttggagtgtagtggtgtaatttttgtttattataatttttgtttttagggtttaagtaatttttttgttttagtttatcgagtaggtgggattataggcgttgttattacgttcggtttatttttgtatttttaatagagacggatttttattatattggttaggttggtttttcggttttttaaagtgtttagattatagacgaagaatatttttaagggtaaaagtatatgtgagggagtagaaaaatggtaaaataagagaagattaataaatgaaagtataatgaaagattagaaagatatgatatatagacgtattattatattttaaaatttcgatattttagaaagtatgggtagtttatagatggttagtttttgttaaattgggggagaatattaatttttttatattttttatagttattgttttttttttttttattttttattttttatttaaagtattttgttttgttattttatttaaatttaattttatagaatagttttatatgttttaaagttatttattagttaatttatatttcgttgaaatttttaggttttaatgtaaatgattttaaatttgggggaaaaaaaagattttaagtgtaagagaggtgttataataattaatttttaaaattttgttattattttattttatttaatggagaagttatgtagttgaaagaatattttaatttttgtttagattagtggtttttaattttttggaagttaaggtttttattaagaattttagaaaggttttaagtttgtttttttttttttttaagtttgtttaaaaaaaaaaaaattaggttgagtagagtggtttatatttgtaattttagtatttggggttaaggcgggaggattatttgagtttaggagttggagattagtttgggtaatatgataagatttcgtttttatattaaagaaaaaagtcgggtatggtggtatatgtttgtagttttagttatttaggaggttaaggtgggaggatggattgagtttaggacgttaacgttgtagtgagttacgatttcgttatagtattttagtttgggagatagaaagagattttgttttaaaaataaaataatggtcggtgtagtggtttacgtttataattttaatattttgggaagtggaggcggggaaattatttgagtttaggagtttaagaatagtttgggtaatatggtgaaatttagtttttattaaaaatataaaataaaataaaatagcgggtgtggtgggtatatttgtggttttaattattcgggagattgaggtgggagtatcgtttgagttggggaggcggaaggtgtagtgagtcgagatagcgttattgtatttagttgggtgatagagtgagattttattttaaaaaaaataaaataatataaaaattaaagtttttaattttaggagttataggaatttttaattaaggtttgttttagattttattattatatttatatttatattatgttagtagtttgaaattataatgtataagtagatatttattttttttttttggaggaatagattgtaatttattttattgtttttaagagaaattaaattagatttattgttaaaattttgttgtattatttatttgattttgaataagtattttaaatttttataggttttaatatttatagggttgttggaagcgtaaaataagataatttatgtttagttacgataagagatataattatgttattattataattatggttattcgtgagttttcgggttttttttgtttttgtttttgtttttttggagtttttttttgtcgtttaggttggagtgtagtagcgcgatttcggtttattggaattttcgtttttcgggtttaagcgatttttttgttttagtttttcgggtagttgggattataggtatgcgttattacgttcggttaattttttttgtatttttagtagagacgaggtattaatatgttagttaggttggttacgaatttttgattttaggtaattcgtttttttcggttttttaaagtggtgggattataggcgtgagttattgcgtttcgttaatatttttttaatattaataataaaaagtgatttgtagttaatatttagtgttatgtgttaagtaatattttaaatgtttaaaatggattattttattaaattttattaatgttataattttatttatggatgaaaagtgtaattggttttaaatatttagtttataaacgatagtgttgtgattatttaagttaaagtaaattgatttaagattttgcgtatatttatttttaatagtttttttcgttattttttagatttaattattaaagttttattgaatttaaaatagattatattatttatatgtaaagaggaaaaatatttttaaaatatttgtggaaaaggttaaaaattgtaagttatattaacgatttgtaagaattttagaattttttttttttaagtaaaggtagttattaaagtgtttcgggcggggaggggggcgagggaggtgagtatgaggagcggagtggagttggatttttataaagggatagcgataaatattttatatttaaaataaggggatttttagtgttatttgcgtcgtcgggttattgtaaatgttcgcgttgagatgtttattttgttattcgacgtagtcgttaaagtttattcggagttgcgttagtttttattgggtttttttaggttaaggaggtacgattttcgtcgtagtatataaagtatatgtttaggagatgggaagaaattcgtcgatatagtattcgggtgtttaagttttcgagaattaggtcgcgcgggtattacggggtgcgcgatcggttagaaagttcgggttaggggtgtttaggagcgagtatcgtcgggaataagcgtcgggaataagtcgggagaaagaggaagcgtcggcgttaaaggtttttcgtttatcgttgtttttttaggattttttatgcgtttgtaaggttacgtcgtttataggattgcgttagcggtcggcgttttaatagagcgcgttagggagtagcgtcgtcgggagttatgacgtttgagtagcgcgagtcgtcgttcggttaggtcgaggtcgtcggttttttcgagatttatttatttgtcgaggcgacggggtggagttttgtatcgaggcgatgtatcgttttacgttagttttgttgcgttttatcgcgtcgttaatttggttttcgaggcgcgtgagattagcgtttaggttcgtagtagtcgttatttttaagaggaaagcgtttgtaaattagtgacgtagcgtcgtagtcggcggaggattattgtgacgaatttgcggcgtagtcggcggaggattattgtgacgaatttgcgtattgcgttagtagtgtgcgttacgttggcgacgtcggcgttcgagttgtattcggttaggtttttggtagcgtcgcgtgttttgagggtgttttggtaagtcgggattagatttcggtcgttagtgtttatagtttagggcgtagatttttagtagataataatttgcgtgatgggtttttaagcgttttggttatttgttttaaattataagtgcgtaatgtattggaagaaaaaaagtatttaggttaatttggtgaacgtgtaaattggaataaagtttttggagatgattggttaaatacgttgtatcggatatgtgtgaatattaaagtatatatttttaaatttatattttattaaatgagggttaggcgtggtggtttacgtttgtaattttagtattttgagaggttacggcgggcggattatgaggttaggaaatcgagattattttggttagtatagggaaattttatttttattaaaaatataaaaaattagtcggtcgtggtgtcggacgtttgtagttttagttatttcggaggttaaggtaggagaatcgtttgaattcgggaggcggaggttgtagtgagtcgagattgcgtcgtttgggcgatagagggagatttcgtttgaatttaaaaaaaaaaaaaaagggagatttagaattgtataatgaaaaagattataaatattaagttttggataattataattttttaaatagttatttcggcgggggattggttttagaattatcgttttatgttaaaatttacgtatttcgtcgggcgttgtggtttacgtttgtaattttagtattttgggaggtcgaggcgggcggattatttgaggttaggagttcgaaattagtttggttaatatggcgaaagtttatttttattaaaaatataaaaaattatttgggcgtggaggtgggtttttataattttagttattcgggaggttgaggtacgagaatcgtttgaaattgagaggcgagggttatagtgagttgagatcgcgttattgtatttaagtttgggcgagagtaagattttttaaaaaaaaaaagaagaagaagaagttcgcgtatttttaaatttcgtagttagttttgcgggtggaatatttagaggaaaagttagatttttttatatgtaggtttttttaatattgtattttttgtcggtttataagcgggtttaggtagtttaaatttatgttatttaagggttaattgtgtatataggaatagttattcgtttggtatagtggtttaagttggtagttttagtattttgggaggtcgaggcgggaggatttttcgagtttaggagttttaggttataatgaattgtgatagcgttattgtattttattttgggtattagagtgagatttttgttttaaaaaaaaaaaaaaaaaggaaaaggaatagtttttttaaatttatatatattttattagtagaataatagaatatattaaaatttaatagtaataatgtaaagattttgagtcgtttgtattttttaaatttttaaaaatgtttattttgggaatttggatattaaaattttatttttaaaataaaatttaataaaatatttttaatagtgagaattttttagattttaaaagtttatatttgtgtaaatattatagtttgaattatgtggataaatattaaatgcgttgatatttttaattggaaatttgggttattttggttgtggataattttttattttttttgtttttttatattttttaaattttgatataatgaataagtattgtttttttaaaaaaggaaaaatagtattttgttttattttaataatattggatgtgaataaaagaaaagaaaaagatgattttgagtttattagtgtgtgtgatttatattaatagaaatgatatgtaaagaaaatttagtttggagtggaaaattttattttaggtagttgattttttttatttgaggtattatttatatatttatgtggggatagtttagtaggaagatgaaatggtaggatagagattttgatggaagttagtagttgcggtatagttttgaggtttagttattttaaaggtagagggggaaatatttttttagtttaggattggagattgtaatgagttatgtttatgtttttgtattttagtttgtggaagagaatgagatttttatttttaaaacgaaaagagggttaggtacgatggtttacgtttgtaattttagtatattgggaggtttagatgggttgattgtttgaggttaggagtttaaggttagtttggttaacgtgttgaaattttatttttattaaaaatgtaaaaattaattgggtatggtggtgtatgtttgtaattttagtttttttggatggttgaggtatttgaattgtttgaatttgggaggtggaggttgtagtgagttgagatcgtgttagtgtattttagtttgggtaatagagtagattttgttttaaaataataataataataatatttaattaatttaaaaataaaaattaaaagagaagatttgatggatttaaaagttatatattttaggtgataggtgaaattataagtttgttttgaaaagtgtgttgataataatagttatagttaataagtatttgttgtgttttaaagttttttttgttagtattttatttgtattaatattatttttttattaattttgtaagggtattgttattatttttagtttttatagataaggaaagtaaaagatagttaggtattatggtttatgtttgtaatttaaaattttgggaggttgaggtgggaggattatttgagtttagtagtttaagatttgtttgggtaatatagtaatattttgtgtttataaaaaaaaagaaattaaaaattagttaggtatggtggtgtttgttagtagttttagttatttgggagattgaagtaggaggattttttgaggttaggtgttggaggttgtagtgagttatgtttattttattgtattttagtttaggtgatagagaaagattttgtttttaaaaaaaaaaaaaaaaaaaggaaattaagagaatgagtattgaagtaatttgtttaaatatatttatttagtaaaaatggtattattaatttatttatgttgaatatatcgaaaaggagtgtttaaagagagaatttttttttttttttttttttttttttttttttttgagacggagttttattttgtggtttaggttggattgtagtggtataatttcggtttattgtaatttttgttttttaggtttaagtaatttttgtgttttagttttttgagtagttgggattataggtatatgttattatattcgggttattgttgtatttttagtagagacggggttttatcgtgttggataggttggttttgaatttttggtttttagtgatttatttgtttcggttttttaaagtgttcggatataggtgttcggtatttatcgcgtttagtatttaaagagagaatttttttgaggaatttaaaagattttttttttttggataagtagtttatatttttgtatttattagggatttttatattttattttattttatattatattttttttttgtttagtggtataatatttttattaaggtattgaaaattttatttgtattagtgtttaatgttatatattttttattatgttgtaaatatagtttatttgtttagttttattgaggtataatttataaataaaaattgtatatatttattaggtataatatgatgttttgttgtttaagtatattttattttatcgtattatattttattgtattttatagatattatgttttttataaattgaaagtttatgtttattttgtgttaaataaatttttttgtattattttttttttttgagatagagttttatattgttatttaggttggagtatagtggtaagattttagtttattgtaattttttgtggtaggttaggttttattaatgtagatttttataataattgttttagtaattattgaatgaagttaaatattaaaagttagtgtttttatataaaggttgggatgtaataaaaggttattaaaatttttgtttaggtttgttttgggttttaaagtatgataaaataatgaaggaatttttttttttttttgagatggagtttttttttgttatttaggttagagtgtagtagtaggattttggttcgttgtaatttttgttttttaggtttaagtgatttttttgttttagttttttgagtagttgggattataggtatgtatgattacgttcggttaatttttgtatttttagtagagatgggtttttattatgttggttaggttggtttcgattttttgatttcgtgatttatttattttagttttttaaagtgtttggattataggtatgagttatcgtatttagtttataacgaaggagtttttaataggatttatttaggattaaattagttttattgcgggtttgaagaaattttttaggtttttatagataagtttattgggggtttgaaagaattttttaaatttttgtgatttagcgggaggtaagataagggtaattatttcggtatcgagggggagtttgtagtgagttgagattgcgttattgaattttagtttgggggatagagtgagatttcgttttaaaaaaaaaaaaattattttaatatttagattaattagattaagtaaatttattgaggttttagagggaggtttttaggatttagattttagttatatattaaaagaagttaattatttacgtttttagatgaatgtatatttatacgtagatatataatttagaaggtagataagttttggaaaattttgtaattttgagttggtttggcgataatttttaggtttttt

SEQ ID NO: 143 - DNA, 6478 bp, Artificial Sequence
  chemically treated genomic DNA (Homo sapiens)
tttattttgaagggatgtttaagaaatattgttaaatttaaaagtgttgtagagtaatatgtattataagattatattggtataatagtaataaatagtatttttttatataattttaaaaaaatatatagatttatgttaagtattagttaagatgtttggtatatggtaggtatttaatatttaatgaatatatgtagaggatttttattttttattttatattttttggataagattttgaatttttatgagtatgtattatttaaatttagatttatagggagtgatggaaaatgtgaaaataaaattttaaaaaggaaaagaaagagtaaagatttagatttaaaaaaggaaatgtaaataagatgaaatagttaaagataggtttttttaaaattaatgttgagataatgttattagtagtgatagttagttaagagatggttcgtagtttattgtttagtattgaggtatttagtaggggttgtatttaatttttaagttggaattaatcgaaattgttgggtttgaagagttgtttttatgagttatcgacggtagaaagtatagaagtattaaagaaaataatttagaaatgtggaaagagaaaagtatgtttttgttttgggagaataatatttgtgtgtaattaagtaggaagattttgtggaggaaagtttgaaaaagtagagagttgaagagaaaagagttaaatgaaggatacggtggttaatatttaaagtaaaaagatatttttgaagaagatgtgtttttagggtttttaagaagtcgttatatttatgtttagagttattttgtaagtttatttggaaagtgtattggtgttttttggtataagatttacgaatattaatagttttgttatgtgagtaggtgtttatattgaagggttataagtaaagtttttatgtgttattattgttagaatttttttcgtttttttttaatataaaagtagttttgtttgttagtatggaagttttgggaagagttttatatttgtttcgtgttgttaatatttttgttttggtttttttgttggaatatataagttatttagtattagttatttatttttttggtagaattgtggtaagaggggattaatagggaaaaaaaattaaaaaataaataaaaagttaaaataatatgaaagagttgggtatgtttttaaaataattagtgtttattttttttagttttgtgtttgtgtttgtttgtattttgtatgtttgtttttgtggtggggggggatatgtttgcgtttttgaaaatttttttatttagatattataaggtattagtttaattttgaatatagtcggttgtagtacggtgtatagatacgattgttttttttttagaaaattttttagtttaaatatgtttgtagagtatgatttatggtgtttttttttggattgtttagtgggtaattgttgtacgaaaattagagaaatagatgtagattttgaattttggttataaatttttgttttatgattatgggttttaaatgtgttgtgttatattgataaatatatagttattttgaaataaaatggattttatttttaaagttttgttttttgttttttattttttgtttgtttgttggttggaaatatatttattagattattgattaaatataaagaaaatagagatgatatatattagaatgttattttatgttataataagaagatatttgggaaagttttttttaattttgtggttaatgtttaaaatgggtgttagtagtttatattttattacggataaatcggtttattttttattttttattttatttattaatttttatagtgtacggatttgtatttaaagaattatggtttatttatgtattttttttttattttatttaaaatgaagaatttggagatagaattaagtttttaagaagtgtaagtatttattgatgaagaaataattagtatgtggttaaattatgggtttgttttataaattaatatttggattaagtaatagttttaattattgttattagtataattaatttatgatgaggaatgattaattgattagcgaatattgttatattataagaaatttatattattttttttatggggatttaaatattgattatttattttaaggtttaagtttattttttagttgagaattttaaggtaattatatattttatatttttttgtataaagaaagaaaatatcgagtcgtttaatttttattatatatagagagagatatattaatgttgttatttttgtgtaatgatatagtatagaggtaagaaattcggaagtagtggtttcgtttaatgaggttgattttatagtttaagaaatgagaatgaatagaattttgaggatatttatttttatttttatttttttgggattagtgtatttttattttttggagagatgttaagtaagaatgtgtagtagttttttttggataatagatttttgtatatatatatttgttagtgatgttatgttttttatttttaatttaagttttttttgttttatttttaatatagttgttttttttttttttgtttaataattttttatttatttttattgttcggtaaaaatgaatttagtttttaaggaattttaaggattttaaataagtatttggagttataagttttatggattaagtagaaattggtatataatgtagtgttttgtgtatttttataattattttaatgatagtgtgttaaatgttttgtaaatttttttgtgtttttttgtttaaaatgtgtgttttttttgtagttaaagggttttttataataagtttttgttataaaatgatggttatataaaagagagaagagaggcgtaaaaataataaatatagatttagtaaaaattttatttttttattgttttgaattttttaatagtaagaattgagtttgttgggttgaaaattgttttaatgtatttttataaaaggatttttgatttggtaagtgtgtgcgatgtatattttttatgttatattataagtgttatttagtaattttattagatagggtagtgttttagtatggggtggggtgttttttgataggtttttaaaaggttcggatgttaatgtatattttaatattatttataaaaaggagattggagtagtgtttttttttgtattgggtaaggagattttttttttttgtttaattatttgtttgttttgttttgtgggagaattataagtaaatgttatagaggtagtggagaaaaaagggtgttttaatttttttttagagttttttttatttgatgtatgttgtattttttaaataagttgtgtaaaatggttgtagggtagattggtttttttttttaaagttttttattcggttgggtttatttgtaaatattgtatttattttttttagtgttttaggattggttggaaagatttttttttttgtaggttgggttagtgtgagagatttaaaaaattatttttttttaaaattattgtattttaataaaaggattgggtaggggttggaatgagagaaaattggttttttaaaatgtaaaattgttatatttaaattagtttataaaatatgcgtttaattatgtggtgggatgtgtgtaggtgtatgatgagagaggtaattaatatggttatttggggtgtaaggatgtgggaataggtaagtaatttttatattggatttttattttagggagttgggttttagttatagttttgagttgtgtgattttgggtaggttttattttttcggggttttgttttattagttgaatagtatgaggatgagttatagttaatatttgttttatgatatttatttagtattatataagtgttatttttgtttttttagttaatattgacgtgggtagtattatatgtttattttatagatgaggaaattgaagtttgaagaagttaaatatttattttagaatatatagttggtaagtggtagatttggaattggaatttagtttagtttgattttttaatttatgtttttgattattatattgtttttttaagtttagatttgaaattttattttttgtgtggttgtgtgtttgggataggggtaattaatttttgattattttatatgttgtatagaatttggagaggattttttaaagtaaatgaatttcgaaagttggattgtagagtaaacgagtgtagttaatttagttaggggtttgtaagagggagaaagagaaaaagattgtggaatggaaagttttttaatttaagttttttttaaggggtagttattttttgttttatagtttagggtttgtatgtgttttttttggagtggaaaaatatataagttataaggaatttaatagatagaaaggcgtatagaggaatttaaagtgtgggttggggggcgaggcggtgggcgggaggcgagcgggcgtaggcggaatatcgttttttaagttaagtcgtcgtaaataaaaaggcgtaaagggagagaagttggtgtttaacgtgagttaggagtagcgtttcggttttttttttgtttattttaaaagtattttttgtattgtttttaaggtgagaaataggaaagaaaacgtcggtttgtgcgttcgttgtttgtttttttggttgtttgtttttgtagggttgttgggagtttttaagttttgtgagaattttgggagttggtgatgttagattagttgggttatttgaaggttagtagttcgggtagggtttatcgaaagtttattcgtatatattaggtaatttaattttttattttgtgtgatagaagtagtaggaagtgagttgtttagaggtaggagggtttattttttgttaaaggggggattagaatttttttatgcgagttgtttgaggattgggatgtcgagaacgcgagcgattcgagtagggtttgtttgggtatcgtcggggtaggattcggaacgtattcggaaggttttttgtaagtatttatttggaaggagaatttgggatttttttgggaatttttcgtttcggttggattggtcgagtaagtttggaaaatggtaaatgattatttggattaattataggtttttagttggtttgtttgttataatttatgattcggggttgggaaaaagattaatagtttacgtgttaaaaaaggggtagagtttgatggagttgggtggatttttttatgttatttgtttttatatttagaggataagtatttttgtagatatttagtgtaagggagattatgtttgattgtatggatgttttgttagtgagttttgggtaaattttggatttttatattgcgagttcgtttttttgtatgttttaggagaaagtttttaaagtatgttttagtggattgatttaaatcgaatggtagtatcggtatattgtttaatgtaggtttatttttttttttttttttattaagaaaaaaaaaattgttttttttgtatgtaataaagacgttggaaataaattgtattggtagtaagataaaggatttaatgatttaatgttgaaggggtgtgatatgttggtatgtatattgattttttttgttgaaaattttttgttagatgttttttttttaaataatttttttcgtttttatgtttttttttttattaattttatagttttttgaaaatagtttttaaaatatgtataaaaatgtggggggtggggagtagagggtgattataagattttaaaatattttttaagtagggtaatttgatatattttgtagtttttattaaaatgtatgtagagtggaatttaattttgttgttttttggattagttattagttgtataggtttttttattttttgtgtattttaatagtttaaagtaattaaaatatgatattttttttgaaaggaatttagtttaattaaggtggttgttgttttcgaagtttataaattattagtttaagttgtcgtttttaatgttttttttgttaaggaaaggtaatattttttagtattgattttgttgttatttttttaagttattttgttggtttaagaagttgttgttttgttagaaaattattggtaatgaatattttttggattgagttatttattatttttatattttgtagtttagttcggaacgtggatattagttaaaggaaaggaaatataagtggggtagtttaatttaaaaaaaaaatattgattattttgttatttgatgttgatatagtgtcgaggtacgtatttggttaatagtagtttggttgtaggtttgagaaatgattaggagttttagaaaattttattttcgggtggttgtagtgggagtttgtaggatgtttcgtcgttttgatagtgatttagataaatggtttagttatttattaaaatgtttttagtattttatttg

SEQ ID NO: 144 - DNA, 6478 bp, Artificial Sequence
  chemically treated genomic DNA (Homo sapiens)
taaataaagtattaaaaatattttgatagatagttgagttatttatttaaattattgttagggcggcgaagtattttgtaggtttttattatagttattcgaaggtgggattttttgggatttttgattattttttaagtttgtagttaggttattgttgattaggtgcgtatttcggtattgtgttagtattagataataaaatagttaatattttttttttaaattgggttattttatttatatttttttttttttaattgatgtttacgtttcgggttgaattgtaagatatggaaataatggatggtttagtttaaggggtgtttattgttagtagttttttagtaaaatagtaattttttagattaataaagtgatttggaaaggtggtagtagggttaatgttaagaaatattgtttttttttagtaaggaaaatattggaagcggtagtttgaattggtggtttatgaatttcgggagtagtagttattttaattaaattaaattttttttaaggaaaatgttatattttaattattttggattgttggaatatataaggggtggggggatttatataattagtagttaatttaaagaatagtaaagttaaattttattttgtatatattttagtaaaaattgtaaaatgtgttaaattgttttatttgaagaatgttttaaagttttgtggttattttttattttttattttttatatttttatgtatattttaaaaattgtttttaagagattataaggttggtaaggagaggagtatgggggcgggaggggttatttgggaagaaaatatttaataggaaatttttagtaaagggaattaatatgtatgttagtatattatatttttttagtattaaattattaaattttttgttttgttattaatgtagtttatttttaacgtttttattgtatgtaagagagataatttttttttttttggtagaagaagggaaaaaaataaatttatattgagtagtgtgtcgatgttgttattcggtttgggttaatttattgaagtatgttttgagagtttttttttggagtatgtaggaagacggattcgtagtgtagaaatttaggatttgtttaggatttattgatagaatatttatatagttaaatatgattttttttgtattgaatgtttgtaaaagtgtttattttttaggtgtggaggtaaatggtatagaaaagtttatttaattttattaaattttgttttttttttggtacgtaggttgttggttttttttttagtttcgaattatgaattatgatagataagttagttaaaagtttgtaattgatttaaatgattatttattattttttaggtttgttcggttaatttagtcggggcggggggtttttagaaagattttaagttttttttttaagtaaatgtttgtaaaaagtttttcgaatgcgtttcggattttatttcgacggtgtttagataaattttgttcggatcgttcgcgttttcggtattttagtttttaaatagttcgtatgggggaattttggttttttttttggtaaagaatagatttttttgtttttgaatagtttattttttattatttttgttatatagaatgaaagattgaattgtttaatatatgcgagtgaattttcggtgaattttattcgggttgttaatttttaaatgatttaattagtttgatattattaatttttaggatttttatagagtttaaaaatttttagtagttttgtaaaagtagatagttagagaggtaggtagcgagcgtataagtcggcgtttttttttttattttttattttaaaaataatataagaagtgtttttaaaatgagtaggggaggagtcgggacgttgtttttggtttacgttgagtattaatttttttttttttacgtttttttatttgcggcggtttagtttggaaaacggtgtttcgtttgcgttcgttcgtttttcgtttatcgtttcgttttttagtttatattttaaatttttttgtgcgtttttttgtttgttaaattttttataatttatgtatttttttattttagaaaaagtatatgtaagttttaaattgtagaatagagaatggttattttttgggaaaggtttgggttgggaaattttttattttatagttttttttttttttttttttttgtaagtttttggttgaattgattgtattcgtttgttttgtaatttagttttcgagatttatttattttgaaaaattttttttaggttttatgtagtatatagagtagttaggaattggttatttttgttttaaatatatagttatatagaaaatgagattttagatttggatttgaaaaaatagtatagtggttaagagtatgggttggggaattaaattgaattagattttaattttaggtttgttatttattagttgtgtgttttgggataagtatttaatttttttaggttttagtttttttatttgtaaaatgggtatataatattatttacgttagtgttaattgggaggatagaaataatatttgtatggtgttgggtaaatattatggaataaatgttagttgtgatttatttttatattgtttaattggtgaaataaaatttcggggagatgagatttatttaaggttatatagtttagagttgtgattagaatttagttttttaggatgaaagtttaatgtgaaaattatttgtttgtttttatatttttgtattttaaatagttatgttggttgttttttttattatatatttatatatattttattatataattaaacgtatattttgtaaattggtttaagtatgatagttttatattttgaaggattagtttttttttattttagtttttgtttaatttttttattaaaatatagtaattttaagggaaaatgattttttagattttttatattgatttaatttataggaagaagagtttttttagttagttttaaaatattaagaaggatagatgtagtatttataaataaatttagtcggatggagagttttaaaagggagagttaatttattttgtagttattttgtataatttgtttaaaggatgtaatatatattaaataaaggaaattttggagaggaattaaaatatttttttttttttattgtttttgtagtatttatttgtaatttttttataaaatagggtaggtaagtggttaggtagggagggagagtttttttgtttaatgtagggaagagtattgttttagttttttttttgtggatagtgttggaatgtgtattggtattcgggttttttaaaagtttgttagggggtattttattttatgttgaaatattgttttgtttagtggagttgttaagtggtatttgtggtgtaatatgaaaagtatgtatcgtatatatttattaagttaaagatttttttatgaaggtatattaaaataatttttagtttagtaagtttagtttttgttattgaaaagtttagggtaataaaggggtgagatttttgttgaatttgtgtttgttatttttgcgtttttttttttttttttatatggttattattttgtaatagagatttattgtaagaaattttttaattataaagaaaatatatattttaagtaagagaatatagaggaatttataaaatatttaatatattgttattaaggtagttgtaaagatatataaagtattatattatgtgttaatttttatttggtttatgaggtttatggttttaaatgtttatttaaggtttttagagttttttggaaattgagtttatttttatcggatagtggaggtggatgaaaagttgttagataagagaagaggaaatagttatattggaagtagagtaggagaaatttaagttagagatgagaaatatggtattattgataggtatgtgtgtatagggatttgttatttaggggaggttgttgtatatttttgtttaatatttttttaaagagtagagatgtattggttttagggaagtgaagatggggatgggtgtttttaaaattttgtttatttttattttttaagttatggaattagttttattgagcgagattattgttttcgaattttttatttttatattgtattattgtataaaaataataatattagtgtgtttttttttgtgtgtggtaaaggttgggcgattcgatgttttttttttttgtgtaagaaaatgtaaaatatataattattttgaagtttttaattgagaaatgaatttgggttttgaaatgaataattagtatttaaatttttatgaaaggaatagtatgggttttttataatatgataatattcgttagttaattaattattttttattatgaattaattatgttgatagtaataattagagttattatttaatttaagtattaatttataaaatagatttatgatttagttatatgttaattatttttttattagtaaatgtttatattttttgaaaatttgattttgtttttaaattttttattttaagtaaaatgaaggaaagatatataaataagttataattttttaaatatagattcgtgtattataaagattaatgagtagggtagaaagtgaaaaatagatcgatttgttcgtaatgaaatgtaaattattgatatttattttaaatattagttatagggttggaagaaatttttttaaatatttttttgttatggtataaaataatattttgatatgtgttatttttattttttttgtgtttgattaatgatttaataaatgtatttttaattaataagtaaataaaaagtgaaaaataaaaagtaaaattttgagagtaaaatttattttgttttagagtaattgtatatttgttagtgtgatatagtatatttgaaatttataattataaaataaaaatttatagttagggtttagggtttatatttgtttttttggttttcgtatagtaattatttattggataatttagaaagaaatattatgaattatgttttgtaaatatgtttgaattggagagttttttgaagaaagagtagtcgtgtttgtgtatcgtattgtagtcggttgtgtttaaaattgggttaatattttgtgatgtttaaataagaagatttttagaggcgtagatatatttttttttattataggggtagatatgtaaagtgtaggtagatataggtatagggttgggggaggtggatattgattgttttaaagatatgtttagtttttttatgttgttttggttttttgtttgttttttaattttttttttttgttaatttttttttgttatagttttgttagaagaataaatggttagtattgagtgatttgtgtgttttagtagggaagttaaggtagagatgttggtagtacgaggtaagtatgaggttttttttagggtttttatattagtaggtagagttgtttttgtgttggaagggagcgggggaagttttaatagtaataatatatggaaattttgtttgtggttttttagtatgaatatttgtttatataataggattgttgatgttcgtggattttatattaaaagatattaatgtattttttaaatgaatttgtaaggtggttttgggtatgagtatagcgattttttagaaattttagaaatatattttttttaaaaatgtttttttattttgagtgttggttatcgtgttttttatttggtttttttttttttagttttttgtttttttagatttttttttataaagtttttttatttggttatatataaatattgtttttttaagataagggtatatttttttttttttatatttttgaattattttttttagtgtttttgtgttttttgtcgtcgatgatttataaagatagttttttaagtttaatagtttcggttggttttaatttgaaagttaaatataatttttgttgaatgttttagtattgagtagtgagttgcgaattattttttagttgattgttattgttggtggtattgttttaatattagttttggggagatttatttttggttattttattttgtttatatttttttttttaaatttagatttttattttttttttttttttttaaaattttatttttatattttttattattttttataaatttagatttaagtaatatatgtttataaaaatttaaagttttgtttaaaagatataaagtgaaaagtaaaagttttttatatgtatttattaaatgttgaatatttattatgtgttaggtattttaattggtgtttggtatagatttgtatatttttttgggattgtgtgggggggtgttgtttgttgttattatattagtatggttttatgatatatattgttttgtaatatttttaaatttagtaatattttttgaatatttttttaaaataaa

SEQ ID NO: 145 - DNA, 5359 bp, Artificial Sequence
  chemically treated genomic DNA (Homo sapiens)
aggagtggcgtaaaaggtgattatttatagggtaggcgttttatttttgttagttgcgggttatgttatgtggtattaagagattttgtaggcgggtagggcgtatgtgttttttgttttcgttttgttataatgttgtttacgtatttttttcgttttttttagaaattagtaaagatagttttggtattaagttagttaataagcggtttatgttttttttagaaatgtaagtaggaagtttttttcgggaattttttgagattaggggtggaaatagttgggtttagttttttgttaaatgattgggggtttttaatcggttttgtattagtagggtttttagtggtgtagggtttatattaatttttttttttttttttttgttttttaaggaaatttgttttaaagaaatttaaggtcgatggttagtgagaggaagttgattagtttttggatttttttttagatttttttgttttaggaatattcgttagggtttattttttttatttcgttttagtattcgtattttattttcgcgagtcgttgtttattttttttttttttttttttttttttgtttttaaaataatttaaagaaagtatattttattattgttgttgggaggaagtagaggtagatgggaaagtagagagaggagcgcgttttttttttttttcgttgtcgtttattttggggagagatttttgcggggagggaaggcggagttgaggatagttagtttcgtttttttaaggttgtgcgtttttgagggttaggtcgggggtaggtatggaggggaggaaaggcgttttttttggttttttttagagtggtttttttggtattttggtttgggtgtttggttttgttttttttttttttttttgtgtttttagttatttaattttttttttttaggttttttcggtttattttgtttagtgattttataggaagtttatatatttttttagaggtttttgtgtttttattttttttattttttttttttttttttttattttaaaaaagaaaagaaggaaaaagaaaaaaggggtaaggagtttcgcggcggtttgggtagcgtttgtgtagatttttttgtaggtcgtattgttaattgttgtatttgttgtgttttttaggttgtaattggtgaagtttatatttttattgtaattttagcgtgtggggttttgttttttttttgttgttgttagttgtgtatagaatgtgtaattttttttttttttttttttttttgttttgttttgttttgtttttgtttttttatttttttttttttggttaatttttggtagggatttttttggaggaaaagttggggttagttagggtaggagaggtgtgaaatttgttacgaggggtttgttgtttgttatttagtttaattttttgttgttggtttttgttttttgtttttttgtttgtttttaggtcgttggaataaaggaaggatagtttattttttatgggcgattatttcgtatttatagggtcgagtttaggggagtttgagggagggttggggtttttttgttttggatttttagttttttttatgttttttttttgagtattatcggtatcgttttttaaatagggttgttggttttcgtagttattgttttattttttttaaatcgttatggaaagggtggagaatggaggggaattaggcgtttttggaggtagtttgggagggtgattgtgtagtgttatttataagggaggttagggtaatggagtaggttattagtagtagttgtgtagtatggaatttaggttaggtttcgaggttgggggatttgtttggagttttttgttttttattttaaatttttgtcgaggagtaaggtttgttagtaagttagaaggatttgaatcgagtagttaatttttttagtttttttttatcgatttttgtttggagacgtagtagtttgtgttttttagggtttttggtttgttgtattatagtatatttcgttgtggaaaatgttacgtttagttattttggagtttatttatttggttttgttgttttattttattttttttttcgcgcgtttattgatttgtttttgaggagagtatatcgtttattattgtagagtaatttttgtgatttaatattattatagtgcgatgtcgttttgtgttattttgaataattaaaagattttttttgaaataattattaggtgttttattgtgtttcggtatttttttaggaagtttgagcgggaaggttgagatttgttcgaggtttacgggagttttttggagggagatttgagttttggtgaaagcgtagaaggttttagagtgaggtttttgttgtggttttcggtttttggattaagtcggattagggtttagtaggttgtttggtagttgttttgtagggtaagggttaaagagttttttgggtagttgttgttgattttttgtgtttggggtttagatttttttttttttttttttgtattagaggataggatggggtaagggtttggtaggttattagcggtagtttttttgggtgggttggggggaggtgggttgagttaagtatattacgggtattgtagaggtggatttttttttttggtttttttttaaatgtgagttatgtttttaagggaagaagtaagagtttgtgatttagattgattatttagtagttgggtcggtaggatagttgggatttcgtgggttgaatttgtattaggaggtttagaaagtttcggggtaaggtggtcggagtagtataggtttaggcgggtttgaggggagtgatattttgtttttggggtttggtgtttttggcgtatttgtatttttcgttttttttaagtttttgtcgtttgtttttgttttttttatatatttttattgtttagttttttttttagagtatttaggtatttcgttattagaagtttttggagtaattaaagttttcgtgtttttatttgtggtatgggtgtgtgtgtaaggttttgtcgaatgcgattttttttgggaagtttttgttttgtggggtttgttgtgttatgtgggggtggggggaagtagattggttagggtttgatattaggagttatggttttgttttatttatcgtattaattgtgatttgttttggagtttagtttcgtagaggtttaaggagaggggtgggaaagtgttttttagagtagagcggtaggagttatggttggggttggtggaggttaggggttatatggggttggttttagaatcgaggggttttgcggatttgttatatttttggtaaatggcgttgtgggcgtttcgtttggtgggggtggtataaggtttttttttattttatttttgtagttggtatttgtggggttatttatttttcgtatttttttagtttatttgttttatcgcggttgtattatattttataaggtaagggttatattagttatgtttttggtgtttatttgaaaatatcgcgttttcgtttgagggtattatttagtttggggaggtaggagggaggttggatatgaatgtgaatatgataggtttgtgagtagggtaggtagatatagttcggttgggtataaagtttattttttgagtatgagtcgaggtcgagggtgggtgggagtatatagaggatgtttttttagttgttagggtattagttttattattaagtattttaaaggggaattgtttggggttgggtgggttagtttgtagtagggattgagatagttattgtggtattaaagattagtagtgtagtatttacgtttagaggttggaatttattttgtgtattgttggtttggaaggtaggaattattttagtttagttgttttgtagtattatcgggttagttatagagttatagatagatttgggtagttggaaaataggtttagagaaggggggtgtgggttgttatttgtagttattgtttggttttagagttgtgttatttgtgtaaagaagttagtgttaaggtcgagcgcggtggtttatatttgtaatattaatattttgggaggtcgaggtaggtggattacgaggttaagaatttgagattagtttggttaatatggtgaaaaatcgtttattaaaaaaaaaaaaaaaaaaaaaaaaaaaattagttaggtatggtggtaggtatttgtaattttagttattttagaggtcgaggtaggagaattgtttaaattcgggaagcggaggttatagtgagttaagattatgttattgtattttagtttgggcgatagagtaagattttattttgggaaaaaaaaaaaaaaaattagcgttaatggttgtttattattgattgttgaggtagttggtgataaattgatttaaaagagaggatttgttaggttgggtgcggtggtttacgtttgtaattttagtattttgggaggttgacgtaggaggatcgtttgagtttaggagttcgagattagtttgggtaatattgtaaaattttgtttttattaaaaatataaaaattagttaggtatggtggtttatatttgtggttttatttatttaggaggttgaggtgggaggatcgtttgagtttggtaggttaaggttgtagtgagttgtttgggcgataggatattgttttaaaaaataaagaaataaataataataataataataaaaatagaatttgttttttgtttattttgtgtggtgataggttagagggatttttgtatttaggtttattagttgttttttgttttgttgtatttttgttttataggtttggtagggttaaggtttttagtcgttttgtcggggtttttggtgtagggcggggtgggtggtagtttcgtttttttttattttagatttttcggttattttagttttttttattaagtaggattttgagattagagtttttagtaggggttttggagggattggtttattcgagtggagggtcgcggtaggaataagtgcgggggttttaaagtttcgttttaggtttagcggaattttgaagaggagggggagggtgagtcgggcgcggttgtgttagttgagtgatagttacgggatcgcgattaattttgtttggttttttagaggagtaggagggatgagtaagggttttttagcgcgataggttagtggtggggtgtttggggggagtgttgttttggagggtttcggggatggtgacgtttgaagtttcgtgtagaggtggggagatttttgagggttggttttcgaggttgggggggtttaggttttatgtgggggttgcgtttttaagttttattttttttagg

SEQ ID NO: 146 - DNA, 5359 bp, Artificial Sequence
  chemically treated genomic DNA (Homo sapiens)
tttaggggaaatggggtttgaaggcgtagtttttatatgggatttaggtttttttagtttcgggaattagtttttagggatttttttatttttgtacggggttttagacgttattattttcgggattttttaagatagtattttttttaagtattttattattggtttgtcgcgttgggagatttttgtttattttttttgtttttttaggaagttagatagagttggtcgcggtttcgtgattgttatttagttgatatagtcgcgttcggtttatttttttttttttttttagggtttcgttgggtttggggcggggttttgaggttttcgtatttgtttttgtcgcgattttttattcgaatgggttagtttttttagggtttttgttgggagttttggttttaagattttgtttggtgggaaaagttgggatggtcggagggtttgggatgagggggaacggggttgttatttatttcgttttatattaggggtttcggtagggcggttgagggttttggttttattaagtttgtggggtaggggtgtagtaggatagggaatagttagtgggtttgaatgtagaggtttttttgatttgttattatatagggtagataggaggtaagttttgtttttgttgttgttgttgttgtttgtttttttgttttttgagatagtgttttgtcgtttaggtagtttattgtagttttgatttgttaggtttaagcgatttttttattttagttttttgagtaggtgggattataggtgtgggttattatgtttggttaatttttgtatttttagtggagatagggttttgtaatgttgtttaggttggtttcgaatttttaagtttaagcgatttttttgcgttagttttttaaagtgttgggattataggcgtgagttatcgtatttagtttagtaagtttttttttttgaattagtttgttattaattattttaatagttagtaatgggtagttattggcgttaatttttttttttttttttttaagatggggttttgttttgtcgtttaggttggagtgtagtggtatgattttggtttattataattttcgtttttcgggtttaagtaatttttttgtttcggtttttggagtagttgggattataggtgtttgttattatgtttagttaattttttttttttttttttttttttttttagtagacggttttttattatgttggttaggttggttttaaatttttgatttcgtgatttatttgtttcggttttttaaagtgttggtattataggtgtgagttatcgcgttcggttttggtattgatttttttatataagtgatatagttttaaggttagatagtaattgtaggtaatagtttatattttttttttttgggtttgttttttagttgtttagatttgtttgtagttttatgattgattcgatgatgttataaggtagttgggttgaggtggtttttattttttaggttaatagtgtataaaatgggttttagtttttgggcgtgggtattgtattgttggtttttgatgttatagtggttgttttagtttttgttgtaggttgatttatttaattttaaatagtttttttttggggtgtttggtaatgaggttgatgttttggtagttggggaggtattttttgtgtgtttttatttattttcggtttcggtttatgtttaggggatgagttttgtgtttagtcgggttgtatttatttgttttgtttataggtttgttatgtttatatttatgtttagttttttttttgtttttttagattgagtggtgtttttagacggaaacgcggtatttttagataaatattagaggtatgattgatgtggtttttgttttgtggagtgtgatgtagtcgcggtgagataagtgagttgaaggaatgcggagggtgggtagttttataggtgttagttatagaagtggggtaggaagaagttttgtattatttttattaggcgaagcgtttataacgttatttgttaaaggtatggtaaattcgtaaggtttttcggttttggggttagttttatgtggtttttggtttttattagttttagttatgatttttatcgttttgttttgaaggatatttttttatttttttttttgggtttttgcgaggttaggttttaaggtaggttatagttggtgcggtgggtaagatagagttatggtttttggtgttaagttttggttagtttgtttttttttatttttatatgatatagtagattttataggatagaggttttttagaagaggtcgtattcgatagggttttgtatatatatttatgttataggtggagatacggaggttttggttattttaggagtttttggtagcggagtgtttgggtgttttgagaggaaggttgggtagtagaggtgtgtaggggaaataaaggtaggcggtaggggtttggagggggcggggaatgtaggtgcgttaggagtattaggttttagaagtagggtgttattttttttagattcgtttaggtttgtgttgtttcggttattttgtttcggagttttttgggttttttggtataaatttagtttacgggattttagttgttttatcgatttagttgttaggtggttagtttggattataagtttttgtttttttttttgggggtatggtttatatttaagaggaagttagaggaagggatttatttttgtagtattcgtggtgtatttgatttagtttatttttttttaatttatttaaggaggttgtcgttggtgatttgttaggtttttgttttattttattttttagtgtaggaggggagggagggagatttgggttttagatataggaagttagtagtagttgtttaaggggttttttggtttttgttttgtaaggtagttattaagtaatttgttggattttggttcgatttggtttaaagatcggaggttatagtagaggttttattttggggttttttacgtttttattagagtttaggtttttttttagggggttttcgtgagtttcgggtaggttttagttttttcgtttaggttttttgagaggatgtcgggatatagtgagatatttagtggttattttaaaaaaagttttttaattgtttaaaatagtataaaacgatatcgtattatggtaatattgagttataggggttattttataatagtgaacggtgtattttttttagaaataaattaataggcgcgcgagagaagggatggggtaaaataataggattaggtgagtgggttttaaggtgattaaacgtgatattttttatagcgaaatatattataatataataaattagaggttttggaggatataggttgttgcgtttttaggtagaggtcggtaggggagggttggaaagattggttgttcggtttaaatttttttgatttgttggtaagttttgtttttcgatagaagtttggggtggggggtagaaaattttaagtagattttttagtttcggagtttggtttgagttttatgttgtatagttgttgttggtggtttgttttattgttttagttttttttgtgggtgatattatatagttatttttttaagttgtttttaaggacgtttggtttttttttattttttattttttttatgacgatttgggggaggtggagtagtggttgcggaaattagtagttttgtttgggaggcggtgtcggtggtgtttagggagggggtatggggagagttggaaatttaggataaggaggttttagtttttttttaagtttttttaggttcgattttatagatgcggagtgatcgtttatgaggaatgagttgttttttttttgttttagcggtttgaggataggtaaaagggtagagggtaggggttagtaataggaagttgggttgggtggtaaatagtaggtttttcgtggtagattttatattttttttgttttggttggttttagttttttttttagaaagatttttgttaagaattagttaagaagaaaaaagtaaaaaaataaaaataaaataaaataaaataaaaaaaagagaaaagaaaaaagattatatattttgtatatagttaataataataaaaaagggataaaattttatacgttaaaattataatgaaagtgtgaattttattaattgtaatttaaaaaatataataaatgtagtagttggtagtgcggtttgtagggaggtttgtataggcgttgtttaggtcgtcgcggggttttttgttttttttttttttttttttttttttttttttaaaatgggaaagaagagggggagggtagaagaggtgggagtataaaggtttttgagaaaatgtgtaagttttttgtggggttattgagtagggtgggtcgggggagtttgaggaagggaagttaggtgattggaaatataaggggaagaaaagaaaatagaattagatatttaggttagggtgttaggaaagttattttggggagggttaagagggacgtttttttttttttttatgtttgttttcgatttggtttttaggaacgtatagttttgggagggcggagttggttgtttttagtttcgtttttttttttcgtaaaagtttttttttagggtgggcggtagcggggaggaaaggaagcgcgtttttttttttgtttttttatttgtttttgtttttttttaatagtaatggtaaaatgtgttttttttagattattttaaaaatagagagaaagagaaaggggagaggagtgaatagcggttcgcgagggtgaagtgcgaatgttgggacggggtgggaggggtgggttttggcgggtgtttttgaagtaggggggtttggagaagaatttaggggttagttagtttttttttattgattatcggttttagatttttttggagtagatttttttggaaggtagaaaaaggaaagagaaagttagtgtgggttttgtattattggaggttttgttggtgtagggtcggttaggggtttttagttatttgataagaggttgaatttagttatttttatttttagttttagaaggttttcgagaggggttttttgtttatatttttggagaggatatgggtcgtttgttggttggtttggtgttagagttgtttttattggtttttggaaggaacgggagagatgcgtgagtagtattgtgatagaacgagagtaaggaatatatgcgttttgttcgtttgtagagttttttggtgttatatggtatgattcgtagttggtaagggtggggcgtttgttttatgggtggttattttttacgttattttt

SEQ ID NO: 147 - DNA, 7864 bp, Artificial Sequence
  chemically treated genomic DNA (Homo sapiens)
tatttagggttatatttaggggtattggaaagttttatgaaaagagatgggttttggtttttttagtttcgtgattttggggtggagatgttataggaaaggggggttcgatttagagtttaagatagggtttttggatattacgtaagaaagaatttagggtttggtgcggtggtttacgtttgtaattttagtattttgggaggtcgaggcgggtagattacgaggttaggagttagagattagtttggttaatatggtgtaattttatttttattaaaaatataaaaattagttaggcgtggtggcgttcgtttgtagttttagttattcgggaggttgaggtaaaagaatcgtttgagtttgggaggcggaggttgtaattagttaagatcgtgttattgaattttagtttaggtgatagagagagatttcgttttaaaaaaaaaaaaaaaaaaaagaattttaggtgagttcgtaaagtggaagtaaatttgtaaggaataaaagaatggttattttatagagtagtttcgagggttgtatttttttttattttttttgagatggagtttttatgttgtttaggttggagtgtagtggtgtgattttggtttattgtaatttttgttattcgggattaagtaatttttttgttttagttttttgagtagttgggtattataggtatgcgttatacgttcggttaatttttgtattttaagtagagacggggtttcgttatgttggttaggttgtttttgaattttcgattttaagcgatttgttagtttcggttttttaaagtgttgggattataggtatgagttattatatttagttttattttttgatgatatgttaaataaggggtggattattttatgttttttgtttttagtttatataaagtaattttttggcgttgttatggtatttgtaaattgtaatggtgttggtgggagtgtagtagtgaggattagacgttatttttatggttattttggttttggtgggtttgagttagtttttttattgtaatttgttttattagtaaggtttttatttatgtatttttttaaattatttttaaaatttttattttttttgaaatagagttttataatgttatttaggttggagtgtagtggcgcgattttggtatattgtattttttatttttcgggtttaagtaattttgttttagtttttttagtagttgggattataggcgtacgttattatattcggttaatttttgtatttttagtatagatggggttttattatgttggttaggttggttttaaaattttgatttcgtgatttgtttattttagttttttaaagtgacgggattataggcgtgagttattacgttcggcgaggtttttatttttatttatttatttatttatttatttatttatttatttatttatttgagatggagttttattttgttatttaggttggagtgtagtggggtgatttcggtttattgtaatttttgtttttcgggttcgagcgatttttttgttttagtttttaagtagttgagattataggtgtttattattacgtttatttaattttcgtatttttattagaaatcgggttttgttatgttttttatattggtttcgaatttttgattttaagtgattcgtttattttcgttttttaaattgttcggattataggtatgagttattgtatttagttagtaaggtttttatgaattgtattttgcgttgattttttgttttattttgtgattaagaatgttttaattatttaggaatgaagtttagtaggttttagttttattttatttagtttttgtttaagatggagttgttttggtttatacgtttttggtagagagggtatttattttttttttttgggtatttattgtttatttgttaagagcggggagcgttttattttgttgggttcgttgggaattatgtggttattattatttttataattttattttttttggttttagtagaagtttttgtttttagttttgaaggtagtttttttttttcgttttttttttttttttttgagacggagttttattgtgttgtttaggttggagtatagtggcgcgattttggtttattgtaatttttgttttttaggtttaagtgatttttttattttagtttttttagtagttgggattataggtacgtgttattatatcgatttattttagtatttttagtagagataggatttcgtcgtgttggttagattgttttggaatttttgaatttggttttttaaagtgttgggattataggtatgagttattatgatcggtttttttatttggatttatgaggtttgtttcgttttttattatttaggtttattttgtgggatatttttttttagataatattggttatagtatttttttatttttttattttatttttttatgttgtttttaggattttaaggagtttattttataatttatttgtttattgtgtattttattttagaatgtaaagggagttgtttgtttttttttttttttttttttttttttttttttgagatttaggttggattatataattattgtttattgtagtttttattttcggagttgaattaattttgttagttttagtttttagagtagttgggattataggtatatgttattacgtttagttaattgtttttttttttttgagataaagtttcgttttgtcgtttaggttggagtgtagtggtagaattttggtttattgtaatttttttttttcgggtttaagtaatttttttattttagttttcggagtagttgggattataggtatatattattatgtttagttaatttttgtagagacgggtgttttgttttgttgttaaggttggttttgaattttttggtttaagtaattttttttgtttggttttttaaagtgttgggattataggtgtgagttattataaatgaagttatttttttttatttgtatagtttagggttttgtatcgaggaaatataatgttggttgaattaggaaataaatttaggtggagttattttttgaatgttatatagtagggttggtattagattttagggttgtttgagtttgtttttttttttttttgttgttttagggtttatttgggatgagaatgtaaaatttaagagaaggttaaagagtttagttataagataattgatatttaaaatataaaaagtaggtcgggcgtggtggtttacgtttgtaattttagtattttgggaggtcgaggcgggcggattacgaggttaggagatcgagattattttggttaatacggtgaaatttcgtttttattaaatatataaaaaattagtcgggcgtggtggcgagtatttgtagttttagttattcgggaggttgaggtaggagaatggcgtgaatttgggaggcggagtttgtagtgagtcgagattgcgttattgtattttagttttagcgatagagtgagatttcgttttaaaaaataataataataaatttattttaaatataagatttgattttgagtttgtataacgtattttattttaatttttgtgttggcggattttgtttttatttaaaattgtgatgttttgtttattatagatttatttttttttattaatttggatatttaataaatattgaattagaagattatttattttgatgattgagtttttgtttttaagatgtttattttagttcgggttttgtttttgttttttttcgttttgtagtatttagatagttttttgaggaaattgaggtatagaggagcgtatgtgtgggaggtgtgtgtgtgtggcgggggttgtggtgagtttttttgggcggattaagttttttgggttgggtcggggttgatttttgtttatttatcgcggttgaagtcgcgaatgaagtttttcgttttgtagagattttttttaaggcggtcgtatcgtttgcggggtagagatagtcgcggttatttcggtagcggtgatttttttcggttggaggggatcgggaggcgggagaaggcgcggcggtcgcgttgtttggtcggtttgggcggaggaggatgttattttagcgggtgggagttgggatcgaatttcgtcgcggtttttcgtttttatttaatttcgacggggttatgggtagtggggaagggggacgcgcgtttagtgacgttatcgaatttcgagttcggttttcgtcgttgtcgttatagaggggttgcgttgcgttattgtattttttttttgacgttagcgtaagaagttagaaattggtttatcgagcgagagagaagtttggagcggagtttttttttttcgtttttttaatttggtaagatatgtaaagtgtacgtaagagcggattataatttttaatcggttttgcgtgtcgagtatgcgtacggtttttagttagagagcgcggtaaatttttggtagattgacgtttttttagtcgaattaggaggtcggttttatatcggtaaattaatttcgtttttacgagttttatttttttatttttaattagttgtttttttgtcggagtgacgggttcggttgtttttgagggtttagttttttttgatggatatttatattgataaattagatcgtcgggaagtttagagggtgttgaaaagcgtgtatcggaattaatagtttagttgtaaggtttggcgtcgtttaattattttttcggtcgtcgttaattatttcgggtttcgttttcgcgcgtgacgtaattagggtgggtagtaatagttgtttcggtgagggaaacggaggcgttatagttacggtagtcgtggcgattaagtaattcggtaacgcgagttaataataataatcgttcggtcgatttttatttttattttttaggttcggttcggggattttagtacgtttcgttttttttttaatatcgatttcgagattttcgaaaagcgttttcgtagagtagaagtggggagaagcggaggtaattaggggcggtttcggggtggttggtcgggtcggggtgggcggcggggtcggggtagtagtgtttttgtaattatagttcggggggaaggggcgggcggttaaaatggcggcggtattgtttggcgtttagtttatttgtaaaatgggtatgatgatgttttttttatacgattgttaggaggaggtgattttagtggaggggtttgggggtttttggttaattaatagtagttgttttttatttttttttttttttgagggttattttgcggttggagggttatttgggtatatcgtggtatatgggtgttgagtgttagtgtagaagaggttttggtttagttgttagttaggaggtagtattgttcggagttatggttagttgtaggtagggtttttagatttaaatgttttttggggttaggtaggagttataaaagtacggatttggagtttttttttttaattattcgtgtttttgttttattgttttttaaatgttttggatttggggatagggtttatgagtataagggtttttaaattatttgtcgattttttgttatagtggggttgagtcggagggaggttatgtttagtttagtatttgggagaggaatatattttttaatagttaggtttgttttgttttttttttttgttttgttttgttttgagatagggtgttgttgtgttattgaggttggagtgtagtggaataatttcggtttatagttttttgtaatttttgttttttgggtttaagtaatttttttattttagttttttgagtagttgggattataggtgcgcgttattattttcgtttaatttttttttttttttttttttttttttggagatagagtgttattttgttgtttaagttggaatgtagtgataagatttcggtttattgtaattttcgttttttaggtttaagtgatttttttgttttatttttttaagtagttgggattataggtatgtgttattatgtttagttgatttttgtatttttagtagagattgggtttcgttatgttgattaggttggttttgagtgtttgattttaggtgatttagttattttggttttttaaagtgttgggattataggcgtgagttattgcgtttggttaaggtcggcgtttgttttgaagttagtcgtagttgttaggtttttagtgtagtttgggtttgtttttagttttggttatttttggttatagaagggtattgttttattgatgagtttatatttggtgttaagatttataattgtttttagatagagggtttaaaaagtttttgtggttttatgtagtttataggggttttttggatttaaaatatttttttattgggaatgttatttagtcgagaattttaagtttagatggtaggtacgtagggaattggtacgggtttttgggaggtagttttttttatgattttgtttttcggtaataaattgacgagttaggagtatagaatatttagagtttaaatgtagttttgttattattttttcgttgtgtggtttggggtaagtattttaatttttttgagttttagttttttatttagtagatagaatttaaatttagatatggttgttggaaagtttaaaatgaaataggtcgggcgtggtggtttatatttagaattttagtattttttgggaggttaaggtaggaggattgtttgagtttaggagtttaagattagattgggtatgataatgagatttttatttttgaaaaaaatgattatatatatatatatatatatatatatatatatatatatatatatgtatgtatattttaatatatatatataatatatatatatgtgtatatatatgtatatagtgtatatgtgtgtgtatatatatattatatatgtatatatatgtatatgtagattttaatatataagtaaaaaaatatatatatatatatatatatatatatatatatatatatatatatatttagatagagttttgggttttttaggttggagtatagtggtgtaattttggtttattgttattttcgttttttaggtttaagtgatttttttgttttagttttttgagtagttgggattataggtatgtattattacgtttagtaaattttgtatttttagtagagacggggttttattatgttggttaggttggtttcgaatttttgattttaagtgattcgtttatttcggttttttaaagtgttggaattgtaggtatgagttattgtgttcggtttaatagatattttaaaaagatgaattaatatagggaaagtgtttagttttgtgtttggtttataagagtttttaggaagtgtttatttggggtttttagttaaggagatggaggtaagggagggggtagtttttggtagttgagagtgatttagtgagaatcgtattatttttttttgggtgagggtatagagtaattatataggtttaagttttttcgtagtgtggggaaatgcgattttatgtggatgtgggggtttttgggtattagggattgggaaggtaggagttttggtttggggtgagtgggggtgcggagtggggttttagttttggtttatagttggtttttttgtagtgacgggttggatatttttggttattagtttggggatttaattaagttagtgatgaatttaagtatatttttagggaatttagagttgtttttgttttttttgtttgtggattaatttttgttttttttttttttgttttgttttgttttttttttttttattttcgtttttttttttaagg

SEQ ID NO: 148 - DNA, 7864 bp, Artificial Sequence
  chemically treated genomic DNA (Homo sapiens)
ttttgggaagaaagacggggatgggggagagaaaaataaaataaaataaaagaaggaaaaataggaattaatttataggtagagaaagtagggatagttttgggttttttggagatgtgtttgggtttattattaatttaattaaatttttaggttggtggttagaaatatttaattcgttattgtagggggattagttgtagattagggttggagttttatttcgtatttttatttattttaagttaggatttttgtttttttagtttttggtatttagagatttttatatttatataggatcgtatttttttatattgcgggggaatttgggtttgtgtggttgttttgtgtttttatttagagaaaaatggtacggtttttattgggttatttttaattattaggggttgtttttttttttgtttttatttttttagttgaggattttaagtgggtattttttgagggtttttgtaggttaggtatagggttgggtattttttttatgttagtttatttttttaaaatgtttattaggtcgggtatagtggtttatgtttgtaattttagtattttgggaggtcgaggtgagcggattatttgaggttaggagttcgagattagtttggttaatatggtgaaatttcgtttttattaaaaatataaaatttgttgggcgtggtggtgtatgtttgtagttttagttatttaggaggttgaggtaggagaattatttgaatttgggaggcggaggtggtagtaagttaagattgtattattgtattttagtttgggagatttaagattttgtttaaatatatatgtgtgtgtgtgtgtgtgtgtgtgtgtgtgtgtgtgtgtatttttttatttatatattgaaatttatatgtatatatatatatatatatagtatatatatatatatatatatatattgtatatatatatgtatatatgtatatatattgtatatgtatattgaaatatatatatatatatatatatatatatatatatatatatatatatatatatataattattttttttagagatgggagttttattattatgtttagtttggttttgaatttttgggtttaagtaatttttttgttttagttttttaaaaagtgttgggattttaggtgtgagttattacgttcggtttattttattttaaattttttaataattatgtttgggtttgggttttgtttgttagatagggagttgaggtttagagaggttaaggtgtttgttttaggttatatagcggggaagtggtggtagggttgtatttgaattttgggtgttttatgtttttgattcgttagtttattgtcggaaagtagagttatggggaaagttgttttttagggattcgtgttagttttttacgtgtttgttatttggatttgggattttcggttgagtagtatttttagtgggaaggtgttttgagtttaaaaagtttttgtgagttgtatggggttataggggttttttgggttttttgtttgggagtagttatgggttttgatattagatgtaagtttattagtgggatagtgtttttttgtggttaggggtgattagggttgggagtaggtttaggttgtattgagaatttggtagttgcggttgattttagaataggcgtcggttttggttaagcgtagtggtttacgtttgtaattttaatattttgggagattagggtggttggattatttgaagttaggtatttaagattagtttggttaatatggcgaaatttagtttttattaaaagtataaaaattagttgggtatggtggtatatgtttgtaattttagttatttaggaggatgaggtaggagaattatttgaatttgggaggcggaggttgtaatgagtcgagattttgttattgtattttagtttgggtaataaagtgatattttgtttttaaaaaaaaaaaaaaaaaaaaaaaaaaattaaacgggagtggtggcgcgtatttgtaattttagttatttaggaggttgaggtgggagaattgtttgaatttaggaggtagaggttgtagagagttgtgagtcgagattgttttattgtattttagttttagtgatatagtaatattttgttttagagtaaaataaaataaaaggaaagaatagggtaggtttggttgttaaagggtgtgttttttttttaggtgttgggttgggtatggttttttttcggtttagttttattgtagtaggggatcggtagatggtttggggatttttgtatttataagttttatttttaggtttaaagtatttgagggatagtgggatagaggtacgagtggttaagaggaaaggttttagattcgtgtttttgtggtttttgtttggttttagaaggtatttgggtttgagagttttgtttgtagttggttatgatttcgggtagtattgttttttggttagtaattggattagagttttttttgtattaatatttagtatttatgtgttacgatgtgtttagatggttttttagtcgtagggtgatttttaaaggaaggaggaggtaaaaaataattgttgttggttgattaggagtttttagatttttttattgaggttatttttttttggtagtcgtatgagggaggtattattatgtttattttatagatgagttgagcgttagatagtgtcgtcgttattttgatcgttcgtttttttttttcggattgtgattatagagatattattgtttcggtttcgtcgtttatttcggttcggttagttatttcggggtcgtttttggttattttcgtttttttttatttttgttttgcggaaacgtttttcggaggtttcggagtcgatgttgggaaggggacgggacgtgttggggttttcgggtcgggtttggggggtgggggtgggggtcggtcgggcggttgttgttgttgattcgcgttgtcgggttgtttggtcgttacgattatcgtggttatggcgttttcgttttttttatcggggtaattgttgttatttattttagttacgttacgcgcgggggcggggttcggggtgattggcggcggtcggagaagtgattggacggcgttaggttttgtagttaaattattagtttcgatgtacgttttttaatattttttggatttttcggcgatttgatttattagtatgaatgtttattaaaagaaattgaatttttaaaggtagtcgggttcgttatttcggtagggaagtagttggttaagaataaaggggtaggattcgtgaggacgggattggtttgtcgatgtaaaatcggttttttggttcgattaaagggacgttaatttattaaaggtttgtcgcgttttttggttggaggtcgtgcgtatgttcggtacgtaaggtcgattgggagttgtagttcgtttttgcgtatattttatatgttttattaaattaaaaaggcgagaaaggaagatttcgttttagatttttttttcgttcggtgggttagtttttggttttttgcgttgacgttaggggaggaatgtagtgacgtagcgtagtttttttgtgacgatagcggcgaaggtcggattcgggattcgatgacgttattgggcgcgcgttttttttttttattgtttatggtttcgtcggggttgggtggaagcgggaggtcgcggcggggttcgattttagtttttattcgttggggtgatattttttttcgtttaagtcggttagatagcgcggtcgtcgcgttttttttcgtttttcggttttttttagtcggaaaaggttatcgttgtcggggtgatcgcggttatttttgtttcgtaggcggtgcggtcgttttgggaaaggtttttgtaaggcgggggattttattcgcggttttaatcgcggtagataagtaaaggttagtttcgatttagtttagggagtttggttcgtttaggagagtttattataattttcgttatatatatatattttttatatatacgtttttttgtgttttagtttttttaagggattgtttgggtgttgtaggacgagaagagatagaaatagggttcggattagggtgaatattttgggagtaaaaatttagttattaagataaataattttttaatttaatatttgttaaatatttaaattaatgggaaaaaataaatttatgatgaataaaatattataattttaaataaagataggattcgttaatatagggattaaggtgagatgcgttatgtaagtttagggttagattttgtgtttaaaataaatttattattattattttttgagacggagttttattttgtcgttgaggttggagtgtagtggcgtaatttcggtttattgtaagtttcgttttttaggtttacgttatttttttgttttagtttttcgagtagttgggattataggtgttcgttattacgttcggttaattttttgtatatttagtagagacggggttttatcgtgttagttaggatggtttcgattttttgatttcgtgattcgttcgtttcggttttttaaagtgttggggttataggcgtgagttattacgttcggtttattttttatgttttaaatgttaattattttatgattgagttttttggtttttttttaaattttgtatttttattttaggtaggttttagaatagtaaggggaaaagaaaataggtttagatagttttgaagtttaatgttagttttgttgtgtggtatttagaaagtgattttatttaagtttgttttttaatttaattaatattatattttttcggtgtaaggttttgggttatataagtgaagaaaggtgattttatttatggtggtttatatttgtaattttagtattttgggaggttaagtaaggaagattgtttgagttaaggagtttaagattagttttggtaataaagtaagatattcgtttttataaaaattagttgggtatggtagtgtatgtttgtaattttagttatttcggaggttgaggtaggaggattgtttgaattcgggagggggaggttgtagtgaattaagattttgttattgtattttagtttgggcgatagagcgagattttgttttaaaaaaaaaaaagtaattagttaggcgtggtggtatgtgtttgtggttttagttattttggaggttgaggttggtaggattggtttagtttcggaggtagaggttgtagtaagtaatgattgtgtggtttagtttgagttttagaaaaaaaagaaaaaaaggaaaaaaaagaaagtaaataattttttttgtattttaggatgggatatataataaatagataaattgtaagataggttttttagagttttgagagtaatataagagagtggggtaggagaatgagaggatgttgtagttagtgttatttgaggggggatgttttatagaatgagtttgagtggtgagagacgaagtaagttttataaatttaggtggaggggtcggttatgatggtttatgtttgtaattttagtattttgggaggttaagtttaggagttttagaatagtttggttaatacggcgaaattttgtttttattaaaaatattaaaataggtcggtgtggtggtacgtgtttgtagttttagttattggggaggttgaggtgggagaattatttgaatttgggaggtagaggttgtagtgagttaagatcgcgttattgtattttagtttgggtaatatagtgagatttcgttttaaaaaaaaaaaaaaaaaacggggggagagaattgtttttaaagttgggaataggaatttttgttaaagttaggagagataaggttgtagaggtaataatagttatataatttttagcgaatttagtaaagtgggacgtttttcgtttttgataggtgggtaatggatgtttagagagaggaagtaggtgttttttttgttagaggcgtgtgaattagagtaattttattttgaataggaattgggtaaaatgaggttgagatttgttaggttttatttttaaatggttaaggtatttttagttataggataagataggaggttagcgtaaaatatagtttataaagattttgttggttgggtgtagtggtttatgtttataattcgaatagtttgggaggcggaagtgggcggattatttgaggttaggagttcgagattagtatggaaaatatggtaaaattcgatttttaataaaaatacgaaaattagatgggcgtggtggtgggtatttgtaattttaattatttggaggttgaggtaggagaatcgttcgaattcgagaggtagaggttgtagtgagtcgagattattttattgtattttagtttgggtgatagagtgagattttattttaaataaataaataaataaataaataaataaataaataaataaataaaaataaagatttcgtcgggcgtggtggtttacgtttgtaatttcgttattttgggaggttaaggtgggtagattacgaggttaggattttgagattagtttggttaatatggtgaaattttatttgtattaaaaatgtaaaaattagtcgggtgtggtggcgtgcgtttgtaattttagttattagggaggttgaggtagaattatttgaattcgggaggtggagagtgtagtgtgttaggatcgcgttattgtattttagtttgggtgatattgtgagattttgttttaaaaaagataaaaattttaaaaataatttagaaaaatatataaataaagattttgttgataaaataggttgtagtaaagaagttggtttaaatttattaaaattaagatggttatgagagtaacgtttggtttttattgttatatttttattagtattattatagtttataaatgttatggtaacgttaggaagttattttatatggattaaaaataagaggtatggaataatttattttttgtttagtatattattaagaaataaggttgagtgtggtggtttatgtttgtaattttagtattttgggaggtcgaagttggtagatcgtttgaggtcgggagtttaagaatagtttggttagtatggcgaaatttcgtttttatttaaaatataaaaattagtcgggcgtgtggcgtatgtttgtgatgtttagttatttaggaggttgaggtaagagaattgtttgatttcgggtggtagaggttgtagtgagttaagattatattattgtattttagtttgggtaatatggagattttattttaaaaaaaataaaaaaaaatatagttttcgaggttgttttatggagtaattatttttttattttttataaatttgtttttattttacggatttatttggaatttttttttttttttttttttttgagacggagtttttttttgttatttaggttggagtttagtggtacgattttgattgattgtaattttcgttttttaggtttaagcgatttttttgttttagtttttcgagtagttgggattataggcgagcgttattacgtttggttaatttttgtatttttagtagagatggggttatattatattggttaagttggtttttaatttttgatttcgtgatttgttcgtttcggttttttaaagtgttgggattataggcgtgagttatcgtattaggttttgaatttttttttgcgtgatatttaggaattttgttttggattttggatcggattttttttttttgtaatatttttattttaagattacgaagttggaggaattagagtttatttttttttatgggattttttagtgtttttgggtgtgattttggatg

SEQ ID NO: 149 - DNA, 6151 bp, Artificial Sequence
  chemically treated genomic DNA (Homo sapiens)
gttgggattataggtgtttgttattatatttagtttatttttgggtttttaatagagatcgggttttattatgttggttaggttgattttaagtaatttatttttttaggttttttaaagtgttgggattataggtatgagttattgggtttggttttaattgagtttttaaaattatagtttaggttatgtatggtggtttatttttgtagttttagtattttgggatgttaaggaaggaggattatttgatattaggagattaagattttgtttttataaaaaaaaaaaaaatttttgtatttagttagttttggtggtatatgtttatagttttagttatttgggtggttgaggtgggagaattttttgaatttaagagtttgagggtgtagtgagttgtgatcgtgttattttattttattttgggcgatagagtaagagttttttttttttttgagacggagttttattttgtcgtttaggttggagtgtagtggtatcgatttcggtttattgtaagtttcgtttttcgggtttacgttatttttttgttttagtttttcgagtatttgggattataggcgtttattattatattcggttaattttttgtatttttagtagagacggggttttatcgtgttagttaggatggtttcgattttttgatttcgtgattcgtttatttcggttttttaaagtgttgggatgataggcgtgagttatcgcgttcggtaagagttttttaaaaaaataattaattgataaaataaaataaaattatagatcgggtgatattttatttattttttattttatttgttttcgtatatatttttgtttaaaattttttatgggggtcgggtaaggtggtttacgtttgtaattttagtattttgggaggttaagggggtcggattatttgaagttaagagtttgagattagtttgattaatatggtgaaattttatgtttattaaaaatataaaaattagttgggtatggtggcgtgtatttgtaattttagttattcgggaggttgaggtaagagaatcgtttgaatttaggaggcgaaggttgtagtgaggtgagatcgtgttattgtattttagtttgggtgataggcgattttattataaaaaaaaaaataaattaaaaaagaaaatgttttggaattagatataggtggtggttgtataatatagtgaatgtattaaatgttattgaattgtttttttttaaaatggtttattttatggtatgtaaatgttattttaatttataaaaatgtgtcgtataaaagtaggattttaagaatttgttatttgttggtttgttttttgttattttgtgtttgttttttgagataattggggttatagttttcgtttttggttagggttgggagcgggaagaggtttagtttagttaaacgggttgattagtagttttaggataggcggttattttatttttcgaggttataatttgagatcgtattattgtattttagcgtgggtttgggcgatatagtaagattttagtttaaaaataaataataataataataataaaagatattttttattggttttttagtttgatcgtgattttttttttacggtttttaataaaatgatggttattatattattttttgatttatttattttatttatttattgtttttttttttttattggttttagttgtgtttaaggatttgttttttgttttttttatattagtttttattttagggatttcgaattttaaattatttttttttgtttttcgttattttaacgttgttttaaatgttagttttttagagagatttagggtgattaatttttttcgttttggggatttttcggttttagtattgaaatttttatattttgggaaattttttagttttgggttaagtaggattgttggatattttagggagattatttttggttgttttatttaaggtaagttttatttatttattttttttattaagttattattgtattattttttttatggttatgggaattttatttattttatttatatttgtgtttttagtatttagtaaatagtaggcgttatttatttatttatttatttatttatttatttatttatttatttattattatatattatatatatatatatatatatgtgtgtgtatatatgtgtgtgtatatatataaatgtatatatatatatattagagataggtttttgttttgtttattaagttggagtttagaggtatagttatagtttattatagtttagaatttttgggtttaagcgatttttttattttagttttttgagtagttgggattataggtgtgtattattgcgtttggttaatttattttatttttatagagataaggttttattatgttgtttaggttggttttgaatttttggttttagacgatttttttgttgagttattgtatttggattttaataaatatttttgattaaattaataattgaatgaaagggattgattattgtagattatttgagtttaagaatttgttatatggttaggcgtagtggtttttgtttgtaattttaggattttgggaggttgaggcgggtggattatttgagattaggagtttgagattagtttggttaatacggtgaaatttcgtttttattaaaaatataaaaattagttaggcgtggtggcgcgtgtttgtaacgttagttattcgggagattgaaataggagaattatttgaattcgggaggcggaggttgtagtgagtcgagattatgttattgtattttagtttgggcgatagagattttgttttaagaaaaaaaaaaaaattagaagatgatgaaattaatttagtaaattatcgttaatattttaattaaaatgaaatagaataggaaatattagagtgcgttaaagtattattttacggtattttagttatagtattatttgttttagttatagatatgtttgtgtggattgagtttttaggtaaaatgtattttttgttgtatgttgtggttaaaaatgtttgaaaattatttatttagtgattaagagtatggattttggtattagattattagggtttcgattttttataagttgtttgatattgggtaaatttatttattttttttgggttttagttttttgatttgaaaaatggggaaaggtcgggtatggtggtttatgtttgtaattttagtattttgagagtttaaggcgggcggattatttgaggttaggagttttaggttagtttggttaatatggtgaaatttcgtttttattaaaaatataaaaattagttgagcgtggtggcgggcgtttgtagttttagttatttgagaggttgaggtaggagaattatttgaattcgggagatagaggttgtagtgagcgagttagatcgtattattgtattttagtttgggtgatagagagagattttgttttaaaaaaaaaaaaagaaaaaataaaataaataaaaacggggataatgtttagtatttttttaaagatgcgattgtaagatttaatgagtttgtatatttaaaaaatgtttagattatttttaggtatatagtaatttaattagtgtttattaatatgattttttgttgaatgaatgagtggggttgaagtttaattttttgtttttttttagtataagttgtttttttttatttttttagttttttgtttcgaataattatatgtttatttttttattttgtttgttgttaatgtttttttattagaataaaagttttatgaggatttgtttgtttttgttttattcgtagttgaatttattagtttgagaggagggttggtgagtttggtaaatattttttgtaaaggatcgtatagtaaatattttaggtttcgcgtgggatatgtcgtttttgcgtaattattttatttcgtttttgtagtgttaaagtagttttttaagttgtttaaggaaatgggcgtggttatgttttaataaagttttatttataaatttaagtaggtagaatttgattcgtaggtcgtagtttgttaatttttaaattagtttaaaatattgggtttaatataataaaagagagttttttattaggtttatattttataaaagttttttttgatagttttttttttttttttttttttttttttttttttttgagacggagtttcgttttgtcgtttaggttggagtgtagtggtgcgatttcggtttattgtaagtttcgttttttaggttcgtattatttttttgttttagttttttaagtagttgggattataggcgtttgttattacgttcggttaattttttgtatttttagtagagacggggttttatcgtgttagttaggatggtttcgattttttgatttcgtgatttattcgttttagttttttaaagtgttgggattataggcgtgagttatcgcgttcggtcgatagttttttttaattatgtaaaaaatatatatatatttaaatttttagttgggggttcgtgaaaaataggcggcgagcgagagtttgttgatttttgattagattgtttttatatgttttatattttttttgtggggtaaacggagttttttgggttttttaaaattggatttttttaaaacgcgttattaatttacggcgtcgcgcgcgcgatcggttcgttaattttttgagtcgcgcgcgtttttcgttaagattcgttttttttcgcggttattggtcgagtttcgtatttttttttaagggggaacgtttttttttttcgatagattttgtagatagttaatggaacgtcgtagggtttcgcgtttcgtttttttgggggttcgttggaggcgagcgtgggcgggtcgttaggaaggtggggcgcggagtttggtaatcgttgtcggtaataacgtttcgtttcgtcgggcgggcgggttgcgcgaggttggttggcggcgggagtcggaggaggagcggtcgtcgtcgttatcgtcgtcgttatagagattgtagtcgtggagattgttatttattaacggggattaatacgtagtagtcgttgtcgtcgtcgcgggagtcgttgttcgaattttcggttcgaattttaggtgatcgatgcgatcgtttcgggtttagttcggtcggggagtgtggggggcggcggggatttcgttcgggggtcggggggcgggtagtacgttttcgtcgtttattttaaacgttcgggtggtgcgttcgcgggattcgttttcgttatttcgttcgcgcgcgcggcggagtttggggggattttggcgacgtttttattttttttattgattgaacgcgggggaggtgcggtgtcgtcgttttattttttataaaattttttgaggttggggcgttcggggattttttttttacgtttatttttaaattcgttgagttgggggcgtttcgggaacgttttttaaattttttaaattttttgaattgggggcgtttggggattttttttttattttaattttttagatttttgagttgggggtatttaaggattttttttttatttatattttcgaattttttgaattgggggcgttaggggattttttttttacgtttattttttagatttttgagttgggggtatttagggattttttttttatttaaattttcgaattttttgaattgggggcgtttggggattttttttttatttttattttttagatttttgagatggggatattcggggattttttttttatttatatttttaaattttttgaattggggttatttggggttttttttttattttattttttaaattttcgaaattggggtgattttagagtttttttgttatttttagtcgtaaattttttgtatcggggggatttcgaagattttttttttatttttattttaaatttttagatttgatttgtttcggggattttttttttaatggatttttagatatattgaatttgggggtatttttggaattttttttttattttttaattaaaagttggtgcgtttgttttggggagaattttttttgttttttttatttttttattttaaatttttcgagcgagttttttcgggaat

SEQ ID NO: 150 - DNA, 6151 bp, Artificial Sequence
  chemically treated genomic DNA (Homo sapiens)
gttttcggggaagttcgttcggggagtttgggatgaaaaggtgagaagggtaagaggggttttttttagggtagacgtattagtttttagttaaggaatgagaaaaaggttttaggggtgtttttaaatttagtatgtttgggagtttattaaaaagggggttttcgggataagttagatttaggaatttggggtaaaaatgagaagggagttttcgaggttttttcgatgtaagaagtttgcgattaagagtgatagaagggttttggggttattttaatttcggaggtttggggagtaaagtaagaagagggttttaggtggttttaatttagggagtttgagggtatgagtaaaagaggggttttcgggtgtttttattttagagatttggggagtaaaagtgaggagagggtttttaagcgtttttaatttagagaattcgagggtttgagtaaaagaagggtttttgggtgtttttaatttagagatttggggagtaaacgtgagaagagggttttttggcgtttttaatttagaaaattcgagggtatgagtaaaagaggggtttttgggtgtttttaatttagagatttagggggttaaggtgagaagagggtttttaagcgtttttaatttagggagtttgaggagtttgagagacgttttcggggcgtttttaatttagcgagtttgaaggtaagcgtgagaaaggggttttcggacgttttaattttaggaagttttgtaaaaagtgaggcgacggtatcgtatttttttcgcgtttagttaataaggaaagtggggacgtcgttagggtttttttaaatttcgtcgcgcgcgcggacggggtggcggaggcgggtttcgcgggcgtattattcggacgtttggggtgagcggcggggacgtgttgttcgtttttcggttttcgaacggggttttcgtcgttttttatatttttcggtcgggttgggttcggggcggtcgtatcggttatttggagttcgggtcgggagttcgggtagcggttttcgcggcggcggtagcggttgttgcgtgttggttttcgttggtaagtaatagtttttacggttatagtttttatggcggcggcggtggcggcggcggtcgtttttttttcggttttcgtcgttagttagtttcgcgtagttcgttcgttcgacggggcggggcgttgttatcggtaacggttattaggtttcgcgttttatttttttaacggttcgtttacgttcgtttttaacgggtttttaagagggcggggcgcgagattttacggcgttttattggttgtttgtagagtttgtcggaaggaggaggcgtttttttttgaaaaagagtgcgagattcggttaatggtcgcgaagaggggcgggttttggcgggaggcgcgcgcggtttagagggttggcgaatcggtcgcgcgcgcggcgtcgtgggttggtggcgcgttttgggaaagtttagttttaggggatttaagggatttcgtttattttataggaggagtgtgggatatgtgggaatagtttgattaggggttagtaaattttcgttcgtcgtttgttttttacggatttttagttgaaaatttaaatatatatatattttttatatggttaaaagaaattatcggtcgggcgcggtggtttacgtttgtaattttagtattttgggaggttaaggcgggtggattacggagttaggagatcgagattattttgattaatacggtgaaatttcgtttttattaaaaatataaaaaattagtcgggcgtggtggtaggcgtttgtagttttagttatttgggaggttgaggtaggagaatggtgcgaatttgggaggcggagtttgtagtgagtcgagatcgtattattgtattttagtttgggcgatagagcgagatttcgttttaaaaaaaaaaaaaagaaagaaagaaaaaaaaagaaattattaaaaggagtttttgtggggtgtgaatttgataggagatttttttttattgtattgggtttagtattttgaattagtttaaagattggtaaattgcggtttgcgggttaaattttgtttgtttgggtttgtaaataaagttttattggaatatagttacgtttatttttttgaatagtttggaaggttgttttgatattataggggcggagtggagtagttgcgtaaagacggtatgttttacgcgaagtttaagatatttattatacggttttttatagaaaatgtttgttaaatttattagttttttttttaagttggtagatttagttacgagtaggatagaaatagatagatttttatagaatttttattttagtgagggaatattgatagtaaatagaataaagaggtaaatatatagttattcgagataaggggttggaagaataggagaaaataatttgtattgagaaaaggtaggagattaggttttagttttatttatttatttaataagaaattatattagtgagtattgattaaattgttatgtgtttgaaagtgatttaagtattttttaaatatgtaaatttattaaattttataatcgtatttttagaaagatgttaggtattattttcgtttttatttgttttgttttttttttttttttttttgagatagagtttttttttgttatttagattggagtgtagtggtgcgatttggttcgtttattgtaatttttgtttttcgggtttaagtgatttttttgttttagttttttaagtagttgggattataggcgttcgttattacgtttagttaatttttgtatttttagtagagacggggttttattatgttggttaggttggtttggaatttttgattttaagtgattcgttcgttttggatttttaaagtgttaggattataggtatgagttattatgttcggtttttttttattttttagattaggaagttgaggtttagaaagaatgagtgaatttgtttagtgttaaatagtttgtgagggatcggaattttagtagtttagtgttaaagtttatgtttttgattattagatgggtggtttttaaatatttttgattatagtatatagtaggaaatatattttatttaggggtttagtttatataaatatatttataattaaaataaatgatattgtaattaaagtatcgtgaaatgatattttaacgtattttgatattttttgttttgttttattttaattaaaatgttgacggtgatttgttaaattgattttattattttttaattttttttttttttttgagatagagtttttgtcgtttaggttggagtgtagtggtatgatttcggtttattgtaattttcgtttttcgagtttaagtgatttttttgttttagtttttcgagtagttggcgttataggtacgcgttattacgtttggttaatttttgtatttttagtagagacggggttttatcgtgttggttaggttggttttaaatttttgattttaagtgatttattcgttttagttttttaaagttttgggattataggtaggagttattgcgtttggttatgtgatagatttttaagtttaagtggtttatagtaattagttttttttatttaattattaatttagttaaaaatatttattgaggtttaagtgtagtgatttagtaggaggatcgtttgaggttaggggtttaagattagtttgggtaatatagtgagattttatttttataaaaataaaataaattagttaggcgtagtggtgtatatttatagttttagttgtttaggaggttgaggtgggaggatcgtttgagtttaggagttttaggttgtggtgagttatgattgtgtttttgaattttagtttggtagatagagtaagaatttgtttttaatatatatatatatatatttatatatatatatatatatatatatatatatatatatgtgtgtatatatatagtatatgatgatagatagataggtagatagatagatagatagatagatagatagatagcgtttattatttgttaggtgttagggatataggtgtaaataaaatagataaaatttttatggttataggaaaagtgatatagtagtggtttggtgggagaagtgggtgggtggggtttattttagatagagtagttagagatgatttttttgggatatttaataattttgtttggtttaagattaaggggttttttaggatatgggaattttagtgttaaaatcgggaaatttttaaagcgggaagagttggttattttgggtttttttaaggagttgatatttgaggtaacgttggagtaacgaggaataaaggaaaatagtttggaattcgaaatttttggggtgaaagttgatgtggaagaaatagaaagtaggtttttgggtatagttggagttaatgaaaggggaagagtagtgagtgggtggggtgagtgagttaggggatgatatgatggttattattttattggaggtcgtagggaagaagttacgattagattgggaaattaatggagggtgttttttgttgttgttgttgttgtttgtttttgagttggagttttgttgtatcgtttaggtttacgttggagtgtagtggtgcgattttaagttgtagtttcggggagtaaggtgatcgtttgttttggaattgttggttaattcgtttagttaagttagattttttttcgtttttagttttggttagaggcggaaattgtggttttagttattttaaaagataagtatagagtagtaaaagataagttaataggtggtaaatttttagagttttgtttttgtgcggtatatttttgtaaattaaggtgatatttatatattataaaatgagttattttaaaaggaaatagtttagtggtatttagtatatttattatgttgtataattattatttatatttaattttaaagtatttttttttttaatttgtttttttttttatgatggagtcgtttgttatttaggttggagtgtagtggtacgattttattttattataattttcgttttttggatttaagcgatttttttgttttagtttttcgagtagttgggattataggtgtacgttattatgtttagttaatttttgtatttttagtagatatggggttttattatgttggttaggttggttttaaatttttgattttaagtgattcggtttttttggttttttaaagtgttgggattataggcgtaagttattttgttcggtttttatggagggttttaagtaggggtgtgtgcggggataggtggggtggggagtgggtggaatgttattcgatttgtgattttattttattttgttaattaattatttttttaagagatttttgtcgggcgcggtggtttacgtttgttattttagtattttgggaggtcgaggtgggcggattacgaggttaggggatcgagattattttggttaatacggtgaaatttcgtttttattaaaaatataaaaaattagtcgggtgtggtggtgggcgtttgtagttttagatattcgggaggttgaggtaggagaatggcgtgaattcgggaggcggagtttgtagtgagtcgagatcggtgttattgtattttagtttgggcgataaagtgagatttcgttttaaaaaaaaaaaagatttttattttatcgtttagggtggagtgaagtgatacgattatagtttattgtatttttagatttttgggtttaagggatttttttattttagttatttaagtagttaggattataggtatgtgttattaaggttggttaaatataagaattttttttttttttgtagagatagggttttgattttttgatgttaagtgattttttttttttggtattttagagtattggggttatagggatgagttattatgtatagtttaaattataattttaaaagtttagttgaggttaggtttagtggtttatgtttgtaattttagtattttgggaggtttagaggggtggattatttgaggttagtttggttaatatggtgaaattcggtttttattaaaaatttaaaaatgagttgggtatgatggtaggtatttgtagttttagt

SEQ ID NO: 151 - DNA, 6125 bp, Artificial Sequence
  chemically treated genomic DNA (Homo sapiens)
tgtttatgaaggaaaatggagatataaaagagagattaagtttttattaattggtatgattttatattttaagagttaagtagattagatttatgagtagtaatttgggaataaatagaatatatattaggatttggttgatatttgatgggatatttggttgtgtaggattaggttttatgtaatagtttggatgtggtttataggtatagttggaggtttgatggaaagtttttcgtgattttttagttttatgttttataattattgttttttatttattttattttttttattttattttataagattttttttattaagtagttgataatttttttttttttttttgttttattttaaaaatttattagtttgttttttttatttgtttttgtgtagcgtttgtatggttttcggtaagtgatgtaatatttttgggttttagttaatttatttttaaaataaggaaaattatagttttaatttagtgatatatttattgataaaattattagttttaatttagtgatatatttttagtagtaaaatggtttaaatttgggtattatttttttgtgtaaaattaatataaatgttattaatattgttttaaatttaaaaagtaatttttttttttttttttttgagacggagttttgttttgttatttaggttggagtgtagtggaatgattttggtttatcgtaatttttgttttttaggtttaagtgatttttttgttgtagttttttgagtagttgggattataggtatgtattattatgtttggttaatttttgtattttagtagaggcggggttttattatgttgtttaggttggttttaaatttttgatttcgagatttgttttatttggttttttaaagtgttgggattataagcgtgagttattgttttcggtttttttaaaaagtaattttttattttaatttttatatgtagaaatagatttttgattatttttaaaagagttataaatttaaatgtttatagaggttatttaattgaaaagagtataattatttaaataatttgtttatagaatatataatatgtgtttatttttttaaaatttttagatgttttaagaaattttggaaatttgttttttttttgttttttgttttgagacggagttttggttttgtcgtttaggttggagtgtaatgatgagattttagtttattgtaatttttgttttttaagtttaagggatttttttgttttagtttttatagtagttgggattataggtgtttattattatgattagttgatttttttttttttttttttttaagtagagatagggttttatcgtattgtttagggtggttttgaatttttgattttaggtgatttatttattttggttttttaaagtgttgggattataggtatgaattattgtgttcggtttggaaatttgttttttagtttaaagttttttgatttttaaatgttagtaattaagaattttgtaattattttgagttaaataaaattcgagtggggagttaaatgtagtttatagaaggttaatttttaaatttatgttttttattttttgatatgtttttttaggtggtttattgggagttgttaagaattattttaaaggtagttttaatttttttttttttttttttttttttttattatattttaagttttagggtatatgtgtatattgtgtaggttagttatatatgtatatatggtagttttaatttttaaagagaatttttttttttatatttttgtatgtgtttgatttaaaatagttgatgttaaagtgtgggttatagattaaaaaaagtatgtagagtagtttgtaatataatgtatgtgtaaataagttagattttggaatatttttatttagttttgggggaaataggaggtagatttagtgcgagtgatattattgtaagaaatttatttatttttagttgaatagtttaaaggagaagttataattggtaacgttgttttttttatttgtatattaaattgatagaggttattagttattttggagttgataagagaggttgaaaaagattttatagaagatgatatttaatgtttggtttattttttattttttgtagaaaagtattgttttatttttattaatagtttttttgttatagtataaatggtatataaatgtgtaataaattaaaggattttggtttttgtttttttttttagggattttttttttttgttttttgtttgtggtagaagaaagaggaagaggtatagattgggtttttaatttgtgtattttttttttaaattttgagaattattggttttttagtaatattcgttaggtaagaattttgtgtagtaaaaaatagtgttatttttaaatatttttggttatttttgtggttttaatgttggtttaaagattgtgtgtgtgtgtgtgtttggagattagtattatatttaaataaattattatttgtgagattttatataaaaatttggatttttagtttttttcggaaaatggaaggaagttttttatatatttataatatgttggagttgagtattagttaatttatttaggagtattagttattgaattgattattttttatttattttgtaaatttttagttatttttgttttttgtgtttgaggttttttatttgtaaatgtagattatagttatattaattgtattgagttgttatatggatttatttttaaattaataaatatattaagtatttaaaagaatttttagcgtgtgttgaataattagtgttagttgttattgttatattttttgtatgtataaggtttattgtgttgttttaggggttttattaataaaagaatgagaaaataattttttaaaaagatgttaatgttaaagtgtagaaagaaaattaagtatagagttaaagtgaaaaagtttagttttaagtttatttttgttattttgaataagttttttaatttttttgggttttaggtttttcgtttataaaataagaagaatagatgtattgtttttagaggttcgtttttgaaattgaatatgattgaaggttttgggggaaaattagaagaagttatgttgtgataatagatgttaagaggggttaattttttttttgaaaaattgaatatttttttaaaaattttttagttaaaaattaatgtttattgtattttatatagatttaaattatgatgtagtgttttttttatgttattaattaaatattgttttttttgttttatttttttaggaaagaaaattagaaatttggtttttgtttaatagtaaggaaatttatattttttttattgaatgtataagtagtaaaaggggatgttaaggttaggaagtcggagaaagtatatttgttagagtaaataatggtaggttaggtaaaattgagaaacgtggtatgtttaattgtgaatgagagaaagtatatgtttttgtttataaattttatttatatgatagtagttttttttattttttaattgtattaaatgttatggatttggggttatttttgtataagattataatcgaattttgattttagtattatattatattatatataaaattagttaatttgattttttggttaagtttagggtatattagttggtttttggatatacgttaattgttttagattattaaatagtaagttttaaagttggaaaggattttagaaatgatttattttatttatgtagttaaaagatatatgaaaaaatgtttattattattggcgattagagaaatgtaaattaaaattataatgagatattattttatattagttagaatggtaattattaaaaagttaggaaatagtaggtgttggagaggatgtggagaaataggaatatttttatattgttgatgggattataaattagtttaattattgtggaagttagtgtggcgattttttagggatttagaattagaaatattatttgatttagttatttcgttattgggtatatatttaaaggattataagttatgttgttataaagatatacgaatatatatgtttattgcggtattatttataatagtaaagattcggaattaagttaaatgtttaataatgatagattggattaagaaaatgtggtatatatatattatggaatattatgtagttataaaaaatgatgagttaatgttttttgtagggatacggatgaagttggaaattattatttttagtaaattattgtaaggataaaaaattaaatatcgtatgtttttatttataggtgggaattgaataatgagaatatatggatataggaaggagaatattatatatcggggtttgttgtggggtggaggggaggggggaggtatagtattaggagatatatttaatgttaaatgacgagttaatgggtatagtatattaatatggtatacgtatatatatgtaattaatttgtatattgtgtatatgtattttaaaataaagtataaaaaaaaaaaagaaatgatttattttaaattatattttggtgatattttgatagtttataaaagtgttaagaaagtagaatttatgatatttatatttaggtagggtttgtgttttgagaattaagaatattttgatataattttggatgatagtttataaagggatttaaataatttataataaatgagatagaaggtagtttttaatgaaatttaatttggatagttttaggataagaggtgttaatgggaatttttttaaagaatgtggattagtaattatttataaagtggttagaatgattatatatatgtacggattgttatggtagtatgttgggataagaggtatgagagttgaaagttagttttagtataggattttaagaataattgtaaggaagttagttatgtaggagtgatattttaaattttaattttattttaatttattttagagattattatgtagatattagagattgggtcggatataggttcgatagtgattttataaatatttgtggttagttaagtagtagtgtttacgtaggtggtatagtaagtattagtataataataggtaaggagttgttgtttttagaaaagatgttgttatttttattatgttggttgtttaatatatttgtatttaaaaattatttgaattttattgttttgttatgataggtatattttagtttttaggtttatttagtaaatgttttttgagtattttttggatgtgttaggttttttttgtgttaggttatagggatataaaaatgaatatttaagttataatttgtatttttaaatagtttgttttgatttttaaagtaagttattttttttgatatgattatttaaagtttttttttttttttttttttttattgtttattataattttttattttttttatattgaaatgttagtaatattatattttatttagttggtttatagtagtatttaataggatgtatgtattttttaggtagggattttgtttttgtggtattttagaaagtgtttttgtattaggtggttgataaatattgttgaatgaaaatagaataatttttaaggtttggagatttgatttaagttatttaaaaagttgggagtgaatttattattagatatttattataggttttatttatacgtagggtagttggtttgtttggaaagatattgataaagtaatgttgtttatgtatgtggattgtgaatatattggtttgtgattttttttaaagagtggtgagaatataagtgagaaagattatatgttatataatattattttgagatttaagatttgtttataattttttagtattaaagagattttttagtaaacgttgtttttataattataaataagtggttagggagaaggatatagatgggttatagatgatgaaggatatttttataattgatagatgtaaggttatattttttataggatatagaattgggttgggtagggggtgtgttgtaatcgtatagaagttattggtttttaggataagtaaagatatttgagataatcgttttgtgtttgttttgt

SEQ ID NO: 152 - DNA, 6125 bp, Artificial Sequence
  chemically treated genomic DNA (Homo sapiens)
ataaaataaatataagacgattattttagatgtttttatttattttaaaagttaatgatttttgtacgattgtagtatattttttgtttaatttaattttatattttgtaaagaatataattttgtatttattaattataaaaatgttttttattatttataatttatttatatttttttttttaattatttatttataattgtaagagtaacgtttgttaaagagtttttttaatattaagaaattataggtaaattttgaattttaagataatgttatatgatatatgattttttttatttatgtttttattattttttagaagaaattataggttagtgtgtttataatttatatatatgaatagtattattttgttagtatttttttaaataagttaattgttttgcgtatgaataagatttgtagtaaatatttgatgatgaatttatttttaattttttaaatagtttgagttagatttttagattttgaagattattttatttttatttaatagtatttattaattatttaatgtaaaggtattttttaaaatattataaaggtaaaatttttgtttggaaggtgtatgtattttattaagtattattgtgagttaattaaataaagtataatattgttgatattttaatatgaaagaaatagaaagttgtgataaataatgaggagagaagagaaggagaaaattttgagtggttatattagaaaaaataatttgttttaggagttaagataggttgtttgagaatatagattataatttgagtatttatttttgtatttttatagtttagtatagaaagaatttggtatatttaagaaatgtttaagaaatatttgttgaatgaatttaaaaattgaagtatgtttattatagtaagatagtaaagtttaaataatttttggatataggtatgttggatagttaatataatgaaagtaatagtattttttttaagagtagtagttttttatttgttgttgtattggtatttgttgtattatttgcgtaggtattgttgtttgattagttatagatgtttgtaaggttattgtcgagtttgtgttcgatttagtttttgatgtttgtatgatggtttttgaaatagattaaaatgaaattaaagtttaaaatgttatttttgtatgattagtttttttataattgtttttaaaattttatattgaaattaatttttaatttttatattttttattttaatatattattatgatagttcgtgtatgtgtatggttattttgattattttataaataattattaatttatattttttaaaaaaatttttattagtattttttattttgagattatttaggttaaattttattgaaagttattttttattttatttgttataaattgtttaaatttttttataaattattatttaaaattatattaaaatgtttttaatttttagaatataaattttatttggatgtaagtgttatgaattttatttttttgatatttttataggttgttaggatgttattagaatataatttagagtaaattattttttttttttttttatattttgttttagggtatatgtgtataatgtgtaggttagttatatatgtatacgtgtgttatgttggtgtgttatatttattaattcgttatttaatattaggtatattttttaatgttatgtttttttttttttttttattttataataggtttcgatgtgtgatgtttttttttttgtgtttatgtgtttttattgtttaatttttatttatgagtgagaatatgcggtgtttggttttttgtttttgtaatagtttgttgagaatgatggtttttagttttattcgtgtttttataaaggatattaatttattattttttatggttgtatagtattttatggtgtatatgtgttatatttttttaatttagtttattattgttggatatttggtttggtttcgagtttttgttgttgtgaatagtgtcgtagtaaatatatgtgttcgtgtgtttttatagtagtatgatttataattttttgggtatatatttagtaacgggatggttgggttaaatggtatttttagttttagatttttgaggaatcgttatattgatttttataatggttgaattagtttatggttttattaatagtgtaaaagtgtttttatttttttatattttttttagtatttgttgttttttgattttttaatgattgttattttaattggtgtgagatggtattttattgtggttttgatttgtatttttttgatcgttagtgatgatgagtatttttttatgtgttttttggttgtataaatagagtaaattatttttaaggttttttttaattttaaaatttattatttggtgatttaaaataattaacgtatatttaaaagttaattgatatgttttaaatttagttaaagaattaagttaattaattttgtgtatggtataatatggtattaaaattaaaattcgattatagttttatataaagatagttttaaatttataatatttaatatagttgaaagatgagggagattattattatgtaaatgagatttgtaaataaagatatgtatttttttttatttataattaaatatgttacgttttttagttttgtttgatttgttattgtttattttaataggtatgtttttttcggttttttggttttgatatttttttttattatttatgtatttaataaaagaaatatgaatttttttgttattgagtaaagattagatttttagtttttttttttggaggaatggagtaagagaaatagtgtttaattggtagtataagaaaagtattgtattatagtttaaatttatatgaaatatagtgaatattaatttttaattaagaaatttttgaaagagtatttagttttttaaggagaaaattaattttttttggtatttgttgttatagtatgattttttttaatttttttttaaaatttttaattatatttaattttagaaacggatttttgaagataatgtatttattttttttattttgtaaacgaggaatttaaaatttagagagattaagagatttgtttaaggtgataggagtagatttgggattgggtttttttattttgattttgtgtttaattttttttttatattttgatattggtatttttttaggggattatttttttatttttttgttagtgaaatttttaaagtagtataataaattttgtatatgtaaaaggtatagtagtaataattagtattgattgtttaatatacgttaagaatttttttaagtgtttgatatatttattaatttaaaaatgaatttatgtaataatttaatgtagttggtatgattataatttgtatttataaatgaggaattttaggtatagagagtagaagtggttaggggtttataaaataaatggaaagtgattaatttagtggttaatatttttagatgggttagttaatgtttagttttagtatattgtgagtatgtgggaaatttttttttatttttcgaaagaaattgaaagtttagatttttatgtgaaattttataaatggtggtttatttaaatgtagtattgatttttaaatatatatatatatataatttttgaattagtattaagattatagaaatgattaaaaatgtttgagaatgatattattttttattatataaaatttttgtttaacgagtattattagaggattaatagtttttaaaatttggggagagaatatataaattaagaatttagtttgtgttttttttttttttttttattatagataggaaataaaaaaaaaaaatttttaaaaaagaaagtaaaagttagggttttttgatttattatatatttatatgttatttgtgttatagtagaggaattattagtaagagtgaggtaatgtttttttgtaaagaataaggaatgaattagatattagatattattttttgtgaggttttttttagttttttttgttaattttaagatggttggtggtttttgttagtttagtgtatagatgaggaagatagcgttgttagttatagttttttttttaagttgtttaattaagagtagatgagttttttataatgatgttattcgtattaaatttgttttttattttttttagagttggatgggaatgttttagagtttaatttgtttgtatatatattgtattatagattattttatatattttttttggtttatgatttatattttgatattaattgttttagattaaatatatgtaagaatgtaaagaaaaaagttttttttaaaaattaaaattattatgtatatatatgtaattaatttgtataatgtgtatatgtattttaaaatttagagtataataaaaaaaaaaaaaaaaaaaaaaaaaaattaaaattatttttaaagtaatttttaataatttttaataagttatttgggagagtatattagaagataaaaggtatagatttggaaattggttttttatggattatatttgattttttattcgggttttgtttgatttagagtgattataaaatttttaattgttaatatttaaaaattagaaaattttgaattaaaaaataaatttttaggtcgggtatagtggtttatgtttgtaattttaatattttgggaggttaaggtgggtgaattatttgaggttaggagtttaagattattttggataatacggtgaaattttgtttttgtttaaaaaaaaaaaaaaaaaaaaattagttggttatggtggtgggtatttgtaattttagttattatggaggttgagataggagaattttttgaatttgggaggtagaggttgtagtgagttgagattttattattgtattttagtttgggcgataagattaaaatttcgttttaaaataaaaaataaaaaagaaataaatttttagaattttttgaaatatttgaaaattttaaagaggtgagtatatattatgtgttttataggtaaattatttaaatggttatattttttttaattgaatggtttttataggtatttgagtttgtgatttttttgagggtaattagaaatttatttttatatataaagattgaagtagaaaattgttttttgagggggtcgggggtagtggtttacgtttgtaattttagtattttgggaggttaagtggggtagatttcgaggttaggagtttgagattagtttgaataatatggtgaaatttcgtttttattaaaatataaaaattagttaggtatggtggtgtatgtttgtaattttagttatttaggaggttgtagtaggagagttatttgaatttgggaggtagaggttgcggtgagttaagattattttattgtattttagtttggatgatagagtaagatttcgttttaaaaaaaaaaaaaagaaaattgttttttgggtttgaaataatattgatgatatttatattaattttatatagaaaagtaatatttaagtttagattattttattgttagaaatgtattattagattaaaattagtgattttattaatagatgtattattagattaaaattatgattttttttattttaaagatgagttaattgaggtttagagatgttatattatttatcgaaggttatatagacgttgtataaagataagtaagaaaggtaaattgatgaatttttagaatgagataggaagaaaagaaaaagttgttaattatttaataggaggaattttatagaatagagtaggggaaataagataggtaaaaaataatggttgtaaaatataaagttagagagttacggagaattttttattaagtttttagttgtatttataaattatatttaaattgttatataaagtttagttttgtataattaagtattttattaagtattaattaagttttagtatatgttttgtttatttttaaattattgtttataggtttgatttatttggtttttggaatatagggttatgttagttgataaaaatttagttttttttttgtgtttttatttttttttatagata

SEQ ID NO: 153 - DNA, 8866 bp, Artificial Sequence
  chemically treated genomic DNA (Homo sapiens)
  unsure (5449, 5462, 5495..5496, 5532..5533, 5552..5553, 5557, 5567)
  unsure (5595, 5601)
gtttgttttggttttttaaagtgtcgagattgtagtttttgttcggtcgttatttcgtttgggaagtgaggagcgtttttgtttgggtgtttatcgtttgggatgtgaggagtttttttgtttggttgtttagtttggaaagtgaggagcgtttttgttcggtcgttattttatttaggaagtgaggagcgtttttgttcggtcgtttatcgtttgagatgtggggagcgtttttgtttcgttgttttttttgggaggtgaggagcgtcgttgttcggtcgtttcgtttgagaagtgaggagttttttcgttcggtagtcgtttcgtttgggaagtgaggagcgttttcgttcggtagttattcgttcgggaaggaggtggggttagttttcgttaggttagtcgtttattcgggagggaggtagggggttagttttcgttcgttagtcgtttcgtttaggagggaggtgggggggttagtttttcgttcgttagtcgttcgttcgggaggtgaggggcgtttttgtttggtcgtttttattgggaagtgaggagtttttttgttcggttattatttcgtttgggaggtgtatttaatagtttattgagaacgggttatgatgataatggcggttttgtggaatagaaaagggggaaaggtagggaaaagattgagaaatcggatggttgttgtgtttgtgtagaaagaagtagatatgggagattttttattttgttttgtattaagaaaaatttttttgttttgggattttgttgatttatgattttatttttaattttgtgttttttgaaatatgtgttgtgtttatttagggttaaatggattaagggcggtgtaagatgtgttttgttaaatagatgtttgaaggtagtatgttcgttaagagttattattattttttaattttaagtatttagggatataaatattgcggagggtcgtagggttttttgtttaggaaaattagagatttttgtttatttgtttatttgttgattttttttttattattgttttatgattttgttaaatgtttttttgtgagaaatatttaagaatgattaattaaaaaaaaaaaaaaaaaagaatagattataggttaggtatggtggtttatatttgtaattttagtattttgggatgttaagttgggtggattattttaggtcgggagttcgagatcggtttggttaagatggcgagatttcgtttttattaatattataaagattagttgggtatggtggtttatgtttataatattttggaggttggggtataagaattatttgaatttgggaggtagaggttgtagtgagttaagattcgtgttattgtattttagtttgggcgatagagtaagattttgttttaaaaaataaaattaaaaaaaaaaaaagattagtattttttagtatagattatttatttatattaaaaatagaatattggtgtggtagagggggaagttggggtttaggaggcggagtttgaggtttgtttattttttgttttgttttaaaaataaaaaaataaataaaatagattaatgtgtaaaatatttaaattttttttttttttttgttttaacgtttttatatttaagtttaaatggtgataatgatttaaaagtgaaattgaaatggtgagagaagtacgattaaaaagggaattttttttttaatatttatttggaaatattaaatgtagaaaatgtagatatattttgaaaattgttgtaaaaggtttatgaattattttttttttttaaattaataatatttttaaaatttaataatagtaatatgttaataattaatattttatattaggaaatattataatatttgaagaaagtagtttttatatttaaataatttgagaatgtaatttaaatttaatagatttttagaggtagaaatttatgtgggtgaatgtgattttaataagaattagtaggaataaaagttttttgtatagtaaaatttttttgatttggattgatatttagtgaaaagaattggttgtttgtttttagagaaagagtgtttagtagaaagtagaatagtttatggaaatagtatatagtattattatttttttatggtaattagattaataaagtttggttttgtattggttttgtttttataggaataaatagtatgtaattagtttattgaatatttgtttgtaagataagtatgtttgtgaattaggatttgaaagtaattggttataaattttaaaattgtttttgtttattattatttgtttagaaatttttttagtataattatagattttgttttgttttgttggtagagatgggggtttggttttgttgtttaggttggttttaaagttttggttttaagatatttttttattttaattttttaaagtgtagagattatcggtatgagttataaaatttgatttagattttgtatttagagttaaaaaaagtttattggaaaaaaaaaagtttattgaggtttattaggaattatatagtataatatgtattgttttttaagtagttatttatgtttggtttaatagtaattttttttttttttgagtcggagttttgtttttttgttttggagatggagttttatttttgttgtttaggttggagtgtaatggcgtaatttcggttttttgtaatttttatttttcgggtttaagtaatttttttgttttagttttttaagtagttgggattataggtgcgtattattacgtttggttaattttttgtatttttagtagagacgggggttttattatggttaggttggttttgaatttttgattttaggtgattcgttcgtttcggttttttagagtgttgggattatagatgtgagttatagcgttcggtttaggagttttgtttttgttgtttaggttgtagtgtaatggtaagattttagtttattataatttttattttttaggtttaagcgatttttttgttttagtttttcgagtagttgggattataggtatgcgttattacgtttagttaattttgtatttttagtagagacggggtttttttatgttggttaggttggtttcgaatttttgattttaggtgattcgttagttttagttttttaaagtgttgggattataggtatgagttattgcgcgcggttttaatagtaatttttatagttttttaatagaagaaagttaatttagtgaggttttatagaatttatattttattttttagatattatataatttttttttttgagatggagttttgttttgtcgtttaggttggagtgtagtggtacgattttagtttattgtaattttcgttttttgggtttaagtagtttttttgttttagttttcggagtagttgggattataggtatacgttattacgttaggttaattttttgtattttagtagggatagggttttattgtgttgtttaggttggttttaaatttttgagtttaggtaattcgttcgtttcggttttttaaagtgttggtattataggcgtgagttattgcgtttggtttttatatagtttttataattattgtttaatttttttgagaagaatttatagatttttataattattgttttttttgagaagaattttgttaagaaaaaaattattaagattaagggagaatatatatattttatagagtttttattttttttttagagatttttttgagagagattaattttttttataatttaattaacgtaaaaaatatgtataaaattatagtatgatttggaaagaatttatgttttatttattaattaggtttgttttttttgtattttttattttatatttatatttattaaatgaagttgtaaaagacgaaaaagataaaaatgtaaatatttaaatgtttttttttatgtatatttttaatttttgtgtattttaagaatttacgatgtaatgtttatgtttttagtaaaaaagaattttttttttatttgtagttggtgtttagagtaattttaatgtaaagaagttttgtatttatttggtattgttgagtggttgagtagtaaggttgttatttttattgagtggagatatataaagatgatttaggagttttagtttttaggatcggagtattggtggattatacgtgttataaagtagaaagtattaggaaaagtaaattagttattttgagttttagatgtaaataatttttaaattgttattggttaaaatgttttaaatatttagggttttgttataattttaatataaaggggggaggggggagcgggattttatagttttatttttttgttttttagattttaagaatttagatcgtggtggtgtaaattggtgattggtttaaaagaagttggagggggcgtgtaggataggaggttttattattagttttagggtgcgttaaggtttatggtgtaaaaattattatttagaatggcggggtttatggattttttattatggttaaattttcgattatttttgatgagttttaaagattagagtagttgattaggttaggttttttagtagaagggcgcgacggttgtaatattagcggttaaattgtatagttttttataggtcggtttaatgtattcgtattaagattgttaaggttgagggtttttagtttggggaaaaacgaaaggaggtagagggtagggagacgggaaagaagataaggagggtgtagaaaacggggagaggagggggcgggatagtatggggaaggttttaggtttattggagagatcgtggcgtttttatagaaacgtattttttcgtttatgattcgcgtgttagtttttttagtttttttcgcgtcgttttttggttgttttcgtttagtttttttgtgtcgcgtagaataacgagatgacgtatgcgtaaagcgtagcggtcgtatatataaacgcgaattcgggttttttttcgtagtgtcgtcgggatttttggcgggtgaaggtgtgtgttagtttttgcgttattcgagttttgggcgttgtttgttaaagagtcgagtacgcgggtttgttattatgtcgcgttacgggcggtacggaggaggtaagaagttggagttcggtgagggacgttggtgtgggtgtagtgagtattgcgaggtcgtagggttgtcgcggaggttgggagacggttatttcgcgtgcgtaatggcggtttaggagtacgttagacgaagtcggaggtagcggaggcggggtgttgaagggagacgggatggcgggtgtatatttttgtcgagtttcgtatttttgggtatttttgtggtttaatttagtttaaagtagggttgagatgacggttttcgcgttgtttttttcgaaaatacgattcgtttttcgggggggcgttcgcggttttnttcgggtgtcggntttcgtttttttcgcgggggttaataatcgcgnnaggcggggggcggggtatcgttttaattttagtttnngagaggttaggggggggannattnaggacgggantagagtttttttttttatcgtaggaaantaaagngtcgttaagattagtttgggtaatatggcgaaattttgtttttataaaaaaatataaaaattagtcggatgtggtggggtatgttcgtgttttagttattttagaggttaaggtgggaggattatttgagtttggggaggttaagtttatagtgatttgtgtgggtgatagagtgagataaagaaaagaaaaagaataagaataagaatataggtcgggtacgtggttcgtcgggattagtggtttacgtttgtaattttagtattttgggaggtcgaggcgggtggattatttgagattaggagttgaggtaaggaatgtggtggtatacgtttgtagttttagttatttgggaaattgaggtataagaatcgtttgaattcgggaagtagaggttgtagtgagttgagatcgcgttatttatattttagtttgagtaatagagtgatattttgttttaaaaaaaaaaaataatttaaattaatatttattagatcgttatgattatttttaatgtatatatattataataaatttaagataaagtaattatttaattgttaatattataaaagttagaaaaatatattagtgaatataaagattgatgtttttgaagtagaaagagtttttatgaattagtaagttagaatatatattttagtagaaaaaaattagtaaaggatataaataaattgttaataagtataatgtttagttttattgtaaattaataaaatataaattaaaaaatataagatttttttttttgttgttgttttaggagtttttttttgttatttaggttggagtgtagtggtatgatttttgtttattgtaaattttgtttttcgggtttaagtgatttttttgttttagttttttgagtagttgggattataggtgcgtgttagtatgtttggttaatatttgtgtttttagtggagacgggattttattatgtttgttaagttggtttcgaatttttgattttgtgatttgtttattttggttttttaaagtgttgggattataggcgtgagttattgagtttggttaaaaagattttttttttttttagatagagttttgttttgtcgtttagattggagtgtagtggtataattttagtttattataagttttgttttttgggtttacgttatttttttgttttagttttttgagtagttgggattataggcgttttttattacgttcggttaatttttgtatttttagtagagatagggttttattacgttagttaggatggtttcgattttttgatttcgtgattcgtttgttttagttttttaaagtgttgggattataggtatgagttattatgtttggtttaaaaatttatttttaaaattaaatttggtagattaaaaaattaatatttagtattaaggaaggtattgagaattaaaattattgtagatttgttgttttttattttagtattatttataatataaaatatgaaagtaatttaaattttttacgagaggatttttaattaatggaatattatgtaaataaaacgttgtagaagaatatttaatgatttagaaaattgtttatggtataatgtattgtattagttggggttttttagggaaataaaattagtaggatatttatatttatattatttatttatttattaagatttagtgtaaggaattggtttatgtaattatagaagtgaaatagtttgagtttgtaaatttattaaaaaataaaatgttaatattataggatttttaaagaaaatagatagttataaatagtgattgggaaggtataaaattgaatgtgatttttaattttttttttttgagatagggttttgttattttttttagaatggagtgtaatgttatgatagtttattgtaatttttgtttttttaggtttaagttatttttttgttttagttatttaagtagtcggggttatagtcgtatgttattatgtttggttaatttttgtatttttagtagagacggggttttattatgttggttagattggttttaattttttgattttagatgatttgtttgtttttgttttttaaagttttggattataggtgtgagttattattcgatcgattcgtttttaaaagtacgtttataaaaaagaatacggtttttttaatgatttcgattttttcgaaaaggtttataatttgattaaataaattgggttttttgtaaagatcgatcgcggtttaatatgtgtttacgtcgtatcgagagtaaaaattgaattcgtaagaattttggttggttaataaaattcgagttttaggttttttaaagttggaaacgttaatcgcgtgttaaggcgttaggataatttagataaaacgagttagcggagcgggtttgaagcgagacggatgcgggttaatattttgcgatttcgtattttgggtattttgtgtttaatttagttaaagtaggttagatgacgttttcgcgttgtttttttcggagttgtcgtcggtttttttttttttttttttcggcgcggttgttattttgcgtatattgaggatcgtggtggcgtatttttttagcgttttttcgttattttagcggatagatttggtcgtagttgtaagatcgtggttgtgtttgagatagaacgaaattggtagttgtgagttgtatgttttcgttaaataatcggttaaattgcggaatgggaatggggacgtaatttgcgattggcggttgggttttttttagttatttttagcgcggtttatggttttggggcggggagttggagttttgggcgagtttgtgtttgggacgtttgtcgcggaggacgagagtcggcgtagttttgtttttttggttcggttttatcgaggttttttcgtcgtcgacgtcgttgtcgttgcgggttcgcgcgttttcggtgcgttcggggttgtcgggatttatgggtggggtcgggttaggtttcgttttacgtttcggtgtattttattacgcgtttttgtttgtgttcgggagggttatttcgtattatttagaacgttaagaattttgttaaaagtttagttttttagggatttgcggatttttattagttttacgattaagttttgttttggatagagggtattaaatgtgttttatttaattttgaggatggttcgttttaaggtaaataagtaattgaaatttgggttagattttgcgtaacgtgtatttttttatttgcgtttttaaataga

SEQ ID NO: 154 - DNA, 8866 bp, Artificial Sequence
  chemically treated genomic DNA (Homo sapiens)
  unsure (3266, 3272, 3300, 3310, 3314..3315, 3334..3335, 3371..3372)
  unsure (3405, 3418)
tttgtttaaaaacgtaaatagaagaatgtacgttacgtaaaatttggtttaagttttaattatttatttgttttaaaacgggttatttttaagattgggtaaagtatatttaatgttttttatttaagataaaatttagtcgtaaaattggtgaaagttcgtaaatttttgagaaattagatttttgataaaatttttaacgttttaaataatgcggggtgattttttcgaatataagtagaaacgcgtggtaggatatatcgaggcgtggggcggaatttggttcggttttatttatgagtttcggtagtttcgggcgtatcgggagcgcgcgggttcgtagcggtagcggcgtcggcggcgggagggtttcggtagggtcgggttaggagagtagggttgcgtcggttttcgtttttcgcggtaaacgttttaggtataggttcgtttaagattttagtttttcgttttagagttataaatcgcgttggaaataattaaaaaaaatttagtcgttagtcgtagattacgtttttatttttatttcgtaatttaatcgattgtttgacgagaatatgtagtttatagttgttaatttcgttttattttaaatataattacgattttatagttgcggttagatttgttcgttgaagtggcgggaaagcgttgaggaaatgcgttattacggtttttaatgtgcgtaaaatggtagtcgcgtcgagggggggggggaggggggtcggcggtagtttcgagaaaggtaacgcgaaaacgttatttaatttgttttagttggattgggtataaaatgtttagagtacggaatcgtagaatgttaattcgtattcgtttcgttttagattcgtttcgttggttcgttttgtttgggttgttttagcgttttagtacgcgattaacgtttttaattttggaaaatttaaggttcgagttttattaattaattaaagtttttacggatttagtttttattttcggtacggcgtaagtatatattaaatcgcggtcggtttttataagaggtttagtttgtttagttaaattgtaaattttttcggaaaagtcggggttattagaggagtcgtgtttttttttatgggcgtgtttttggggacgagtcgatcgaatagtggtttatatttgtaatttaggattttgggaagtagaggtaggtagattatttgaggttaggaggttgagattagtttggttaatatggtgaaatttcgtttttattaaaaatataaaaattaattaggtatggtggtatgcggttgtaatttcgattatttgagtgattaaggtaggagaatggtttaagtttggggaggtagagattatagtgagttattatgatattgtattttattttgggagagatagtaagattttgttttaaaaaaaaaaaattaaaaattatatttagttttatatttttttagttattatttgtgattgtttgttttttttaaaagttttgtagtattgatattttattttttgatagatttgtaaatttaaattattttatttttataattatatgagttaattttttatattaaattttgatagatagatagatgatatagatatagatattttattggttttgtttttttggagaattttaattaatataatgtattgtgttataaataattttttaagttattaaatatttttttataacgttttgtttgtatagtattttattaattaggaattttttcgtaagaagtttagattgtttttatgttttatgttataggtaatgttgaagtgaaaaataataaatttgtaatggttttggtttttagtattttttttaatattggatgttaattttttaatttgttaaatttgattttaaaaatggatttttgggttaggtatggtggtttatgtttgtaattttagtattttgggaggttgaggtaggcggattacgaggttaggagatcgagattattttggttaacgtggtgaaattttgtttttattaaaaatataaaaattagtcgggcgtagtggagggcgtttgtagttttagttatttaggaggttgaggtaggagaatggcgtgaatttaggaggtagaatttgtagtgagttgagattgtgttattgtattttaatttgggcgatagagtaagattttgtttaaaaaaaaaaaggatttttttggttaggtttagtggtttacgtttgtaattttagtattttgggaggttaaggtgggtagattataaggttaggagttcgagattagtttggtaaatatggtgaaatttcgtttttattgaaaatataaatattagttaggtatgttggtacgtatttgtaattttagttgtttaggaggttgagataggagaattatttaaattcggaaggtagagtttgtagtgagtaaagattatgttattgtattttagtttggatgatagagagagatttttgagataataataaaaaaaagaattttatattttttaatttgtattttgttgatttatagtgaggttgaatattatgtttattggtaatttgtttatgttttttgttgatttttttttgttggggtgtatgttttagtttattgatttataggaattttttttattttaaggatattagtttttgtatttattggtatatttttttgatttttgtagtattaatagttaaatgattattttattttaagtttgttatagtatatgtatattgaaaataattataacgatttggtaaatgttaatttaggttgttttttttttttgagatagagtattattttgttgtttagattggagtgtgaatggcgcgattttagtttattgtaatttttgtttttcgggtttaagcgatttttgtgttttagttttttaagtagttgggattataggcgtgtattattatattttttattttaatttttgattttaggtgatttattcgtttcggttttttagaatgttaggattataggcgtgagttattggtttcggcgagttacgtgttcggtttatgtttttgtttttgtttttttttttttttttgttttattttattatttatataggttattgtgggtttgatttttttagatttaggtgatttttttattttagtttttagagtaattgggatacgggtatgttttattatattcggttaatttttgtatttttttgtagagatagggtttcgttatgttgtttaagttggttttagcggtnttttgnttttttgcggtgggggggggggttttgntttcgttttnggtnnttttttttttggttttttnngggttggggttggggcggtgtttcgtttttcgtttnncgcggttgttggttttcgcggggggggcggggntcggtattcgggnggggtcgcgggcgttttttcggggggcgggtcgtattttcgagaaaggtaacgcgaaaatcgttattttaattttgttttaggttggattgggttataaaaatgtttaagagtacggaattcggtagagatgtatattcgttatttcgtttttttttagtatttcgttttcgttgttttcggtttcgtttggcgtgtttttaagtcgttattacgtacgcggaataatcgttttttaattttcgcgataattttacggtttcgtagtgtttattatatttatattaacgttttttatcggattttagttttttatttttttcgtatcgttcgtaacgcgatatgatgatagattcgcgtgttcggttttttagtaagtagcgtttagggttcgagtgacgtaaaagttgatatatatttttattcgttaagagtttcggcggtattacgaggaagagttcgggttcgcgtttatatatgcggtcgttgcgttttgcgtatgcgttatttcgttgttttgcgcggtataaaggagttgggcggaaatagttaagaaacgacgcggaaggaattgaagagattaatacgcgggttatgggcggagggatacgtttttatgggaacgttacgatttttttagtaaatttgaggttttttttatgttgtttcgttttttttttttttcgttttttatattttttttgttttttttttcgtttttttattttttgttttttttcgtttttttttaggttagggatttttagttttaataattttagtacggatgtattagatcggtttatgaaaggttgtataatttaatcgttgatgttgtagtcgtcgcgtttttttgttgggggatttggtttagttagttattttgatttttggggtttattagaggtaatcgaaggtttggttatggtgaaaagtttatgaatttcgttattttgagtagtggtttttatattatagattttgacgtattttgggattggtggtaaagttttttgttttatacgttttttttaattttttttgaattagttattagtttgtattattacggtttgagtttttggagtttgaaagataaaggaatagagttgtggggtttcgttttttttttttttttttatattgaaattgtgataaaattttgaatgtttaaagtattttggttagtgataatttggaaattatttgtatttgaagtttaaagtaattgatttgttttttttaatgttttttgttttgtaatacgtgtgatttattaatatttcgattttgaggattgggatttttaagttatttttgtgtatttttatttagtggaaatagtagttttgttgtttagttatttaatagtattaaataaatgtaaaatttttttatattagaattgttttagatattaattataaatagagaaaaagtttttttttgttagaaatatagatattatatcgtaaatttttggaatatataaaagttggaaatgtatataaaaaaagatatttaggtatttgtatttttatttttttcgttttttgtaattttatttggtgagtataggtgtggaatggagagtatagggaaagtaggtttagttggtgaataaagtatggattttttttaggttatgttatgattttatgtatattttttacgttgattaagttatggagagaattaattttttttaggaagatttttaagaagaaaatagaagttttgtagagtatatgtgtttttttttagttttggtgattttttttttaataaggttttttttaaaagaaataataattataaagatttataggttttttttaaaagaattaaataataattataaagattatataggggttaggcgtagtggtttacgtttgtaatgttagtattttgggaggtcgaggcgggcggattgtttgagtttaggagtttgagattagtttgggtaatatagtaaaattttgtttttattaaaatataaaaaattagtttggcgtggtggcgtgtgtttgtagttttagttatttcggaggttgaggtaggagaattgtttgaatttaggaggcggaggttgtagtgagttgagatcgtgttattgtattttagtttgggcgatagagtaagattttattttaaaaaaaaagattatatggtatttgaaagataaaatataaattttgtaaagttttattaagttgatttttttttgttaagaagttatgaaaattattgttgaggtcgcgcgtagtggtttatgtttgtaattttagtattttgggaggttgaagttggcggattatttgaggttaggagttcgagattagtttgattaatatggaggaatttcgtttttattaaaaatataaaattagttgggcgtggtggcgtatgtttgtaattttagttattcgggaggttgaggtaggagaatcgtttgaatttgagaggtggaggttgtggtgagttgagattttgttattgtattatagtttgagtaataagagtaaaatttttaggtcgggcgttgtgatttatatttgtaattttagtattttgggaggtcgaggcgggcggattatttaaggttagaagtttaagattagtttggttatggtgaaattttcgtttttattaaaaatataaaaaattagttaggcgtggtggtgcgtatttgtaattttagttatttgggaggttgaggtaggagaattgtttgaattcgggaggtggaggttgtagggagtcgagattgcgttattgtattttagtttgggtaataagagtgaaattttatttttaaaataaaagagtaaaatttcgatttaaaaaaaaagaaaattattgttgagttaagtatagataattgtttgaaagatagtgtatgttatattgtataatttttaataaattttaataaatttttttttttttaataaattttttttgattttgaatataaagtttaagttaggttttgtggtttatgtcggtaatttttgtattttgggaggttgaggtgggaggatattttgaggttaggattttgagattagtttgggtaatagaattagatttttatttttattaataaaataaaataaagtttatagttgtattaaagaaatttttaagtaagtaatagtaaatagaagtagttttaaaatttataattaattgtttttaaattttgatttatagatatgtttgttttgtagataggtgtttaataagttaattatatattgtttatttttatgaaagtagggttagtataaggttaggttttgttaatttggttattatgaaaaaataatagtattgtatattatttttatagattattttattttttattgaatattttttttttaagaataggtaattaattttttttattaaatgttagtttaaattagggagattttattgtgtagagaatttttatttttgttgatttttgttgaaattatatttatttatataagtttttgtttttagaaatttgttaaatttagattatatttttagattgtttgaatatgaaaattattttttttaaatattgtaatattttttaatatgaaatattagttattaatatgttattattgttaaattttaaaaatattattagtttaggaaaggggagtaatttataagttttttatagtagtttttaaaatgtatttgtattttttatatttggtatttttagataaatattaaagaaaaagttttttttttaatcgtattttttttattattttagttttatttttaagttattattattatttgagtttggatgtgaaaacgttaaaataagaaaggaaaaaaaatttaaatgttttgtatattagtttattttgtttgtttttttgtttttaaggtagggtaagaagtgggtagattttagatttcgttttttggattttaatttttttttttgttatattaatattttatttttaatataaataagtagtttatgttaaaaaatattagtttttttttttttttaattttattttttgagatagagttttgttttgtcgtttaggttggagtgtagtggtacgaattttggtttattataatttttgttttttaggtttaagtgatttttgtgttttagtttttaaagtattataggtatgagttattatgtttagttaatttttgtaatattagtagagacggggtttcgttattttggttaggtcggtttcgaattttcgatttaaagtgatttatttaatttggtattttaaagtgttgggattataggtgtgagttattatgtttggtttatagtttatttttttttttttttttttttaattgattatttttgggtgttttttatagaggggtatttggtagggttataggataatagtggagggaaggttagtagataaataagtgaataaaggtttttggtttttttaggtagaggattttgcggtttttcgtagtgtttgtgtttttgggtatttgagattagggagtggtgatgatttttaacgagtatgttgtttttaagtatttgtttaataaagtatattttgtatcgtttttaatttatttaattttgagtggatatagtatatgttttagagagtatagggttgggggtaaggttatagattaataggattttaaggtagaagaattttttttagtatagaataaaatgaaaagttttttatgtttatttttttttatatagatatagtaattattcgattttttaattttttttttattttttttttttttttattttataaaatcgttattgttattatggttcgtttttaatgagttgttgggtatattttttagacggggtggtggtcgggtagaggggttttttattttttagtaggggcggttaggtagaggcgttttttatttttcggacgggcggttggcgggcggggggttgatttttttattttttttttggacggggcggttggcgggcgggggttgattttttatttttttttcggatgggcggttggtttggcgggggttgattttatttttttttcggacgggtggttgtcgggcggagacgttttttattttttagacggggcggttgtcgggcggaggggttttttattttttagacggggcggtcgggtagcgacgttttttattttttagaaggggtagcgggatagaggcgttttttatattttagacgatgggcggtcgggtagagacgttttttattttttagatgggatggcggtcgggtagagacgttttttattttttagattgggtagttaggtagaggggttttttatattttagacgatgggtatttaggtagaaacgttttttattttttagacggggtggcggtcgggtagaggttgtaatttcggtattttgggaggttaaggtaggt

SEQ ID NO: 155 - DNA, 7810 bp, Artificial Sequence
  chemically treated genomic DNA (Homo sapiens)
ttttttttttttttataaaaataaaaataatttatgttgaatttttgtattttattttatttttttttatttttattttttttgtaattaatattagtgggttattattaatagattagtaaatggagataaaagaaaagtatttgttttaaattatttattaggttatagaatagagttggttttcgagtttgtaatttttttatttttggtttttgttattagatagttataattaacgaagaagatattttagattatttagtattagttaatttggattttgtatttgtattatttaatggaagaagatgaaataataggtagtttttatttttaattatttgaaatttttatgcgtagataagtatatttttatggtggttttgtttaatttttgttggtagttaagaaggtgaggtgggaggttatgtaaaatttatttaataattatataattatttgttgattaattttttaattgatttttcgatattgatgaagattatgagtttgtggaattataaaatttattatttcgtagtgtttattttttttaaggtttgtattttttgtgtttgtgtaattttgtatttggaataaagaattattattatttgtgtttaatgtcgtatgatatatataattaattttattgataatttttgaaaatttttaagtaggtttgtaaaaatgtgtttttttgtgagtttttttatttgttttagatttatgtataaatggatttcgtttagttttatttgtttttaaacgcgtatttttgaggtttgggaatttaaggataaaatgattttaatttgatgtattttgtattttgattaataagggaaaaataaatgtttttaaatttgattggttttagttatatttgtcggttattatttgttaaattattgtatttaaaattataggtatgaaagattttttaaaaatagatttttgaggaatgtaaattaatagaacggggaggcggattaatgtgtttgattttttaaaagtttatttattgtttaatttattttcgtttttggatatgttagtaagtaattatttttatggttggtaaaatgattgttaaatatttattaataattgtagttttggaattatttttttattaattagttatgttggtttttaaaaattgttatttttggttagatataggagttaggtgttgagagttgatttggtgttaagttttaggattgtttagtttttatattagatttttagttaggttttttgaatatttttatagttagaaaatttatttttttagattcgtagatgttgttttttttttattggttttgtatagaatattattatttttgttacgtttttgtttttatggtaataatagatggaaagtgttgtggaattatttatgtttaggaaaggaggtagttaagaaggaagaaaaggtgggggggcggggtggagagggggtacgatttgggagttcggcggtggaggtttaaggaagggaatttgggtgggggtgcggggagtggtggggattgagaggtttgtgagtttttcggaggtttgttgtgaggaaaaaaaaaataaaaagtacgagtataagagtatttttagtcggtcgattgtaaatgtgggtttttataggaataattcgaagtagtaaaattagaagaaattggacgaaaatgggggggaaaaaagggataaagttcgagttttttgaattttgtgtattgttattcggtggattattttagtttttgattttgtggtggggtggagaaaaggggattttttggtgtttcgaaatgtgacggagtagttttgtagagtttaatatgttaatcggttattttgggaattaggaagattattttatacgttttagagggttatagtcggaaagtttttgagttttattttttttatttcgtttcgtttttttttaaaaaaatatatatataaaaaaatatttttagtaaatattgtaaaaatttttaatttatagtttttttttggaatcgagagagtagtttggtggggtggaggtaggaggttggggagtagggatagaaatgtttgttttcggttttgtcggaattttggttatttttttcgttcggttcgatggcggatggaggttagttaggggaaggcgtttgggtggaggtcgttcgggcgaggtcggggtcgtcggggcggggcggagcgtcggtagttggttgggcggttttcgggtaggaggtttcgcgggggcgaggggtagtttaggagggaggtttcgcgggggcggggagtagagtcggtttcgggggttttgtagggcggtcgtcgttcggttgttttcggggcggggcggtttagttgcggtttcgtagggggagggtcgttcgtgtttgatttcgggcggcggtattttgtcgggcgggtattgttttcgttttgtcggttgttggggtcgcgtatagtgtatcgcgcggttgttttgttttttttttttcgttgcgcggcgttcgagcggttagggcgttttcgcgtttggtttattattatagagcggcgggtggggcgggggcggggcggtggttttagatagtcggttgggcgattagaggaaggaaggagggagggcggcggtgagggtggggtggggagggaatattttgtttgcgtcgggtgtatcgtagatagcgtcgcgcgttagttttttagacggcgcgcggggttagaagcgtcgggcgcgcgtttggggggaggggtacgcgcgcgagacgacggggttaggggggcgttttgaggagttataataggttagacggtacgcgcgtttacgagggggtcgggagtcgcgaagtggcggcggcggcgacgacgtcggcgggttcgcgcgcgcggcgtcgtcgttggtttcgtttttttttttttttttttttcggggggttcgttttttttcgggcgggcggagacggcggcggcgtttgcgggaagttgtgtgttttcgtagtgacgtgggcgggtcgtggattcggtgacgttagagggttgtgtgtagcgatgtgtgtggggttcggagtcgcgtcggttttgtcgaagggagcgggcgagcggcgacggtttcggtggttggtataggtgcggtttcggtttacggcggcgacgcggcgtttgcggcgggaggtttgaggcgtttatttttttaggagttcgacggcggcgataggggcggtggggaattcgtaaagttcgtcgagtttattcgggtatcgaggttcgagtagggggtttggatgcgcgggtttcgggtggggtcggggttagagggggtcgttaggcgggtgttttacggttgattacgtttcgttggttttaggcggtgggcgtcggtagggtagggcgttgtagttgacgggagtcgcggggatttcggagattcggacgttcgttatcgttttttttttttagtttagtagcgtttcgcggggatgttttggtttcgattcggttcgttagttttcggcggcgtagggattcgcgttcggcgtttaaattgttttggtgtttttttcgttttggttcggggttggcgcggggaggtgtagtattaggggcgttgaggtgatattcgagaattttttagggagagggtgcgcgggggggtggatttttatagtttttttcgcggttttcgcgggggggcggtgttgggagggtatttggggttattttaggttcgtcggtgggggtggggggatttttttttttatttttttttatttttttgtatatttatttttaggtttttcgtgttttttgtttttttttttttcgggttagagataggtgggtggttttgagtgggcggaggattttagggttttaggggtttttttattttaggttatgttttttgtttttttttttggtttgtgttgagtaaggtgtgtttttgtggtggacgaaagtttgtacgatggttggtggtattggtttttaattttttgggtttgttttaaggtaaagtgttgagagtttgggaagtaaaaatttttatttattggattttttttggttttttttttaagaaggaagtggaaaaagagttttttttttttttttttttttttatttgtattttttgtgaggtttgtttgttttgtgttttttgtttcggattagttttgttgaaggatggagatttttaggcgtggagtttatagtttttggtttttattaagtaaaatcgttaatttttttttaagagaaagttaatttttgtttgtagttattttagaaaaatagtgtatacggattagttgaattaatttatttaaaattgtaatttagttatatatggtagatatgttaatttttatttgatttttttggatgaaattgttgttttgtttttaaataggagatgaagtaatggattttttttttttttttaaaatggtatagttgagaaagtttcggtattattaattgagatgatttgtttaagagtttttatattttgaattcgaaaggttttttatgttatattattgttcgttttacgtaattttaaattgtttttttatttaaatgaatgtttttttagtaaattggtgttagatttaaagaaattatttaagttttattttggtaaattgaatttagtttaagattaagaaattgatttcggtcgggtgcggtggtttacgtttgtaattttagtattttgggaggttcgggcgggcggattatttgaggttaggagtttaagattagtttgattaatatggtgaaatttcgtttttattaaaaatataaaaaaattagtcgggtgtcgtggtttgtgtttgtagttttagttatttcggagtttgagataggaaaattgtttgaattcgggaggcggaggttgtagtatgtcgagatcgttgtattttagtttgggcgatagagcgagatttcgtaaaaaaaagaaaaaaaaaaaaataaaagaaattggttttaaattggttttttggtttttggagtaaatttaaatgtaatttttttttaattttttttttttttttttagattaattaaaagaagaatgaattataatttttgaagataattgggtaattttttaagtcggaggttgtttttattggtgtgaggatttatatacgtttttagttttttagtatagattagtagattattatttttagaggaaatattttttttgtttttttttttggtttttttggtggtaaagattaaatttggttgtattattttgatttgtgtttgagtttagattttatggtataaggaatggtataaattttttatgtgttttggttaaaataaattagattattgtattgattttggatatttttaattgagaaattggtaattttattttaatatgtatatttgaagaatttaagaaaataaaggtatttttagaggtgtgttttttttttttattattagaggtaaaacgaataattttataggatttgtagtgaaattatattagattataaggagaattaaaattaagtcgtaaaatttattaatttaaggggttttcgttttgaaagtttgagagtaagttacgataggtatttgtatttatttattatttttttttttttaaataagtaattaaatagaaatgttaattttagatttaattatttaatagaagagtgtattatggaaaatttttagataaatttttttttggtttagggtttaattaaaaaattgaatgggatgggagatgatggtagttttttagcgaaaaaaatgataacggatatttatgtaaatggaaaaacgataaataaggtgttaatagttaagaaggaatatttggatgattatggagaagtattagtggaaattgatggagagtatgttaagcgaatttgtatttttgtttttgaaattttgtatttaaattttagtttgaaatatatattggtataattttatttaagtagttagagttcgttgggtggattagtagtattttttgttcggtatttttaagaaagtatgtcgtttattgtatttttgttttttttattattttaggttttttttggtttattgtttatttttttagatagttttatagaatttatttagattgtgttggaaggggaatttattttttgtttttaagttggaggagaaaagagattttgtttgttttaagttttaaattttgtttttcgagaatttatattttagtaaataaatatagtgtgtgatgaattgtatatatattgtttaaggtgtattttagattagttttatattttaaaggtattgggtatatttttatttaatgttttattttgtgggttgattatattaattgatgtataaagattatgtaatgttttattgcggttacgaatttttttttaaaatggtagcgtattttttgttaaaagtttattggtttagttaaaggaaattggtagtgtttttgaagtggagtatgaatgtttaggtaaatgttagggtttatttgtattttagttttatgtttagtttgatgtttcgtgtatttaatgtttggagtgttgtggaatgtttgtattttagacgtttgtgatgtatttttatagattatttgataaaagaatttgttattggggttttgaattagttaaatggtattgttatttttatgtgaattaaaaatatttaggaatatttgaagaaaagaaattgaagataattttagaagaaatgaaggagaagtttagtatgagaagtggaaagagaaattaatttaaggtaagttttttatattaatttttaataatggtaatggtttattttgaaatgaaaattttatgtttagtgtgtaatttaatttgtatgttgaatattgtttatgtaataataataaaatatcgattgatatatttgtattgtagtttttaggttataaagtgttttgtagtatgtttttttatttgattttttaaatattttgtgagagaagtaagattattatttcgttttatagataaagtgaatgaagtttagagagataaaatgatttttttaaaattatgtagttagggagtggaggagttagggttttttttttttttttttttgtgtttttagtagaggttaggttttagtatgttggttaggttggttttgaatttttgatcgcgtgattcgtttattttggttttttaaagggttgggattatatttttgagtttttgtgtttagttagggtttaaattttttattttttttggtatatattttgttttttgattattatatttgttgtttttttaggattcgataatttgcgttttggtgttatttttatttgtaaatggtataatggttataattttcgtgggtttaaaatagtatttttagagatatatttatgatttttgatgtttttatgtttggatatttaggtttgtttaatatttgaaataaatggaaaagatatgtatttgaagaatttgtgatttgaaaggaataataaaaaaaatgatagttagagtaaggaaaagttattttaaattaataaaatattaatataaaaatttgtcgggtttagtggtttatatttgtaattttaatattttggggggttgaagtaggtggattatttgaggttaggagtttgagattagtttggttaatatggtgaaattttatttttattaaaaatataaaaattagacggatgtggtgtcgtatatttgtaattttagttatttaggagttgaggtaggagaatcgtttgaatttcggaggt

SEQ ID NO: 156 - DNA, 7810 bp, Artificial Sequence
  chemically treated genomic DNA (Homo sapiens)
gttttcggggtttaagcgatttttttgttttagtttttgagtagttgggattataagtgtgcgatattatattcgtttaatttttgtatttttagtagagatgggattttattatgttggttaggttggttttaaatttttgattttaggtgatttatttattttagttttttaaagtgttgggattataggtgtgagttattgagttcggtaggtttttatattaatattttattagtttaaaataatttttttttattttagttgttattttttttgttattttttttaaattataaattttttagatatatgttttttttatttgttttaaatattgagtaagtttgaatatttaaatatagaaatattagaaattataggtgtatttttgaaaatgttgttttgagtttacgggaattgtggttattgtattatttgtaaatggagataatattaaagcgtaaattatcgagttttagaaaaataatagatgtagtggttaagaagtaagatgtgtgttaaagaggataagaaatttaagttttggttggatataggggtttaaggatgtaattttagttttttgggaggttaaggtgggcggattacgcggttaggagtttaagattagtttggttaatatgttgaaatttggtttttattaaaagtataaaaaaaaaaaaaaaagaagttttaatttttttattttttggttatataattttgggaaagttattttatttttttgagttttatttattttatttgtaaaacggaataatagttttattttttttataggatgtttggaaagttaaatgaggaaatatattgtaaagtattttatggtttaaaaattgtaatataaatatattaatcggtattttgttgttgttgtatgagtaatgtttaatatataggttaagttatatattaaatatagaatttttattttaaagtaaattattattattattaaaaattgatataaaaaatttgttttggattgatttttttttttattttttatgttaaattttttttttattttttttaaaattatttttagttttttttttttaggtgtttttaagtatttttggtttatatgaagatagtaatgttatttagttgatttaaagttttagtggtaagtttttttgttaggtgatttgtgagaatgtattataaacgtttggggtgtaaatattttataatattttagatattgaatatacggagtattaggttgaatataaaattggggtgtaaataaattttgatatttgtttaggtatttatgttttattttaaaggtattgttagttttttttaattgggttaatgagtttttagtaggaagtacgttattattttgaggaaaagttcgtggtcgtaataaagtattatataatttttgtgtattagttaatgtaattagtttataggatggggtattgaatggaagtatgtttagtatttttaagatatgaagttggtttgaagtatattttgaataatatatgtatagtttattatatattgtatttatttgttggagtgtaaattttcggagaatagaatttaagatttggggtaaatagagtttttttttttttttaatttgaaaataagaaatagattttttttttaatatagtttgagtgagttttgtggagttatttgaagggatgagtaatgggttaggaagaatttgaggtgatggaagaggtagaaatatagtaggcgatatgtttttttgggaatgtcgagtagaaaatgttgttggtttatttagcgagttttgattatttaaatggaattgtgttaatgtgtgttttaaattgggatttaaatgtaaagttttaggaatagaagtataggttcgtttaatatgttttttattagtttttattggtgtttttttatagttatttaagtgtttttttttaattgttggtattttgtttatcgtttttttatttgtatgaatgttcgttattatttttttcgttggggggttgttattattttttattttatttagttttttagttgagttttgaattaaggagaaatttgtttggaggttttttatggtatatttttttgttaaataattaagtttgagattagtatttttatttagttgtttatttgaaaagaggaaagtaatgaatggatataaatgtttatcgtaatttatttttaaatttttaaagcgagagttttttaaattaataaattttgcgatttagttttggttttttttataatttggtataattttattataaattttataaaattgttcgttttgtttttaataataaagaaaagaggtatatttttgaggatgtttttgtttttttgaattttttagatatatatattaaaataaagttattaattttttaattaaagatgtttagggttaatgtaatggtttggtttgttttaattaaaatatatgaaaagtttatgttattttttgtgttataaaatttagatttaaatataagttaaaatgatgtaattaaatttaatttttattattaaggaaattaaaaaggagggtagagggagtattttttttaaaaatgatggtttgttggtttgtgttgaaaaattgaagacgtgtgtaaatttttatattagtaagaatagttttcgatttaaaaaattgtttagttatttttaaggattatagtttattttttttttaattaatttggaagaagagaaggggggttggggaagagttatatttgaatttgttttagaggttaaagggttaatttgaaattagttttttttattttttttttttttttttttttacggagtttcgttttgtcgtttaggttgaagtgtagcgatttcggtatattgtaattttcgtttttcgggtttaagtaatttttttgttttagatttcggagtagttgggattataggtataagttacgatattcggttaatttttttgtatttttagtagaaacggggttttattatattagttaggttggttttgaatttttgattttaggtgattcgttcgttcgggttttttaaagtgttggaattataggcgtgagttatcgtattcggtcgaaattagttttttaattttaaattgagtttagtttattaaggtgaagtttgagtgatttttttaaatttaatattagtttattagaagaatatttatttaaataggaaagtaatttggagttgcgtaaagcgagtaataatataatataaaaggtttttcgagtttagaatatgaagatttttaagtagattattttaattagtagtatcggggtttttttagttatgttattttaagggagggaaaaaaatttattattttattttttatttaaaaataaaataatagttttatttaaaaaaattagataggagttaatatatttattatatgtaattaagttataattttaagtggattaatttagttagttcgtgtatattatttttttggaatgattgtaggtaaaaattaatttttttttaaaaaaaggttagcgattttatttaatggaagttaaaagttatagattttacgtttgggaatttttattttttaataagattaattcgggataaaaagtataaggtagataaattttataaagaatgtaaatggaggaagagggaaaaagaaaagattttttttttattttttttttgagagaaaagttaaaagaaatttaataaatagaaatttttgttttttaaatttttagtattttattttaaaatagatttaaaggattaaggattaatgttattaattatcgtatagattttcgtttattataggaatatattttatttaatataggttaaggaagagagtaagaggtatgatttagaatgggggagtttttaaaattttgaagtttttcgtttatttaaagttatttatttatttttaattcggagagagggagaataagggatacgggaagtttgggggtgggtgtgtaagggggtggagggaagtaaagggaggagtttttttatttttatcggcgagtttgggataattttaagtgtttttttaatatcgttttttcgcgggggtcgcgggaaggattgtggaaatttattttttcgcgtattttttttttgggaagttttcgggtgttattttagcgtttttaatgttgtattttttcgcgttagtttcgggttagaacgaagaggatattagggtagtttaggcgtcgggcgcggatttttgcgtcgtcgggggttgacggatcgggtcgagattagggtattttcgcggagcgttgttggattgggggaggggggcggtgacgggcgttcgggttttcggggttttcgcggttttcgttaattatagcgttttgttttgtcggcgtttatcgtttggggttaacgaagcgtgattagtcgtggaatattcgtttagcgattttttttggtttcgattttattcgggattcgcgtatttaaattttttattcgggtttcggtgttcgggtaagttcgacgagttttgcgaattttttatcgtttttgtcgtcgtcgtcgggtttttaggagggtgagcgttttaggtttttcgtcgtaaacgtcgcgtcgtcgtcgtaaatcggagtcgtatttgtgttagttatcgaagtcgtcgtcgttcgttcgtttttttcggtagagtcggcgcggtttcgaattttatatatatcgttatatatagttttttgacgttatcgagtttacggttcgtttacgttattgcggagatatatagtttttcgtagacgtcgtcgtcgttttcgttcgttcgggggagagcgagtttttcggggagggggaggggaagggaacggagttagcggcggcgtcgcgcgcgcgggttcgtcggcgtcgtcgtcgtcgtcgttatttcgcggttttcggttttttcgtggacgcgcgtgtcgtttggtttattgtggttttttagagcgtttttttggtttcgtcgtttcgcgcgcgtgtttttttttttaggcgcgcgttcggcgtttttggtttcgcgcgtcgtttgggaagttggcgcgcggcgttgtttgcggtgtattcggcgtagataggatgttttttttttattttatttttatcgtcgtttttttttttttttttttttagtcgtttagtcggttgtttggggttatcgtttcgttttcgttttattcgtcgttttgtggtgatgggttagacgcgggggcgttttggtcgttcggacgtcgcgtagcggggaagagggggtagggtagtcgcgcggtgtattgtgcgcgattttagtagtcggtagggcggaggtagtgttcgttcggtagagtgtcgtcgttcgaggttaggtacgggcgattttttttttgcggggtcgtagttgggtcgtttcgtttcggaggtagtcgggcggcggtcgttttgtagggttttcggggtcggttttgtttttcgttttcgcgggattttttttttgggttgtttttcgttttcgcggggttttttgttcgagggtcgtttagttagttgtcggcgtttcgtttcgtttcggcggtttcggtttcgttcgggcggtttttatttagacgtttttttttggttgatttttattcgttatcgggtcgggcgggaggggtggttaaagtttcggtaaaatcgagagtaaatatttttgtttttattttttagttttttgtttttattttattaggttgttttttcggttttagaagggagttataaattaaaggtttttatagtgtttattgagggtgtttttttgtgtgtgtgtttttttggagagggacgagacgaggtagggaagataggatttaagagtttttcggttgtgattttttgaggcgtgtagggtggtttttttggtttttagggtagtcgattagtatattgaattttgtagagttgtttcgttatatttcgaaatattaagaaatttttttttttttattttattataagattaggaattgaaatagtttatcgagtagtagtgtataaaatttaggagattcgagttttgtttttttttttttttttattttcgtttaattttttttagttttattgtttcgggttgtttttgtgggggtttatatttgtagtcggtcggttggaaatatttttgtgttcgtattttttattttttttttttttataataggttttcgaaaggtttataagttttttaatttttattatttttcgtatttttatttaagtttttttttttaggtttttatcgtcgagtttttaggtcgtgttttttttttatttcgtttttttattttttttttttttttgattgtttttttttttgaatatgaataattttatagtattttttatttgttattgttatagagatagaagcgtggtaaagataatgatgttttgtgtagagttagtgggggaaaaatagtatttgcgagtttagggggatagattttttaattgtgagaatatttagaaggtttagttgaagatttgatgtgaagattggatagttttgaaatttggtattaggttaatttttagtatttggtttttgtgtttagttagaagtaataatttttagaaattaatatgattggttaataaaaaagtaattttaaaattgtaattattaataaatgtttagtagttattttattagttataagaataattatttgttagtatgtttaaggacgaagataaattggatagtaaatagatttttgagaaattaaatatattaattcgttttttcgttttgttgatttgtattttttagaaatttgtttttgagagattttttatgtttgtgattttaagtgtaatggtttgataaatagtgatcggtaaatatgattagaattaattaaatttgagggtatttattttttttttattggttaaagtataaaatgtattaaattaaaattattttgtttttgaatttttaaattttaaaggtacgcgtttgaaagtaagtgaaattgaacggggtttatttatatatagatttgaggtagatggggaggtttataggaaggtatatttttgtaggtttatttaaggatttttagaagttattagtaaaattgattgtatgtattatacgatattgaatataaatgataatggttttttattttaaatatagaattgtatagatatagaaaatgtaggttttagaaaaaataagtattgcgaggtaatgaattttgtaattttataggtttatggtttttattagtgtcgaaaagttaattaaaggattggttaataaatagttatgtagttattaggtggattttgtatgattttttattttatttttttggttgttagtaggagttgagtaagattattatgagagtgtgtttgtttgcgtatgagaattttaaatgattgggggtggggattatttattgttttatttttttttattaaatagtatagatataagatttaaattaattggtattaggtagtttagaatgtttttttcgttaattatggttgtttgataatagagattaagaatggagaggttataaattcgaaggttagttttgttttgtgatttgataaatagtttgaggtaaatgttttttttttgtttttatttattgatttgttgataatgatttattaatattaattataaagaagatggaaatgagaaaggatagggtaagatgtaaaaatttaatataaattatttttatttttatgaaggagggggaag

SEQ ID NO: 157 - DNA, 5825 bp, Artificial Sequence
  chemically treated genomic DNA (Homo sapiens)
agtaaattaaatgggatagtagattttagtaacgaagtatatagttttggaggtagatagattaagaagaaattattttgaatgttttggaaattgggtttaggtttggttttttatttttaaaatttttttattttggaggttattatgtaaatataataaagagtttagaaggttgtttatttgtttttagtgtaatgttagttgtttttgtttattttttttttgattgtatagattgatgacgttataatattttttttttcgtttattttataaaattattataatttgttgtgtaaatgttgtgtatatttttataaatataaatgtgttattttgaattatgagtatattaataagtttaataaatttatataatgtttatttgaaattgtggtaattgtaaaataaggttaggttgatgtttttagggttgagttaaatttatttattttttattaggtggtagattttgttaaaaagttacggaaaaggaaagaaagataaagaaaataatgagttttttgaagttgattaatagatgtttttttgtaattatatatttttgagttgtcgtttaaaatatatataaatttaatattttttagttttttttttttattttatagataatattattaatattttttataaggtatatatagaatattgaagagatgaatattttttattttttatgatgtatttaattatattttatttatttaaagggaaatgagattatataaatataattaggaataagattttgaatataagtgatttggtagaaagtagattttattaaaatgttgtttttaagttaagggttttttgtttggagtgattttaaatatttattgattatatgtgatggtatttattgagttattggtattagtattaattttagatagacgtagatgtttagtggttattggtttgttgaatatgatattgggaatacgtaggaaataatggaaatttttaaatagtagagggatattttgatattatttttggttattatttttttaatatttagatatgtgagtgtttatataaaggtgtgtttatgtttatatttggttttgttgatattattaagtatatatatttatatatgtggagtgtataggcgagtgttatttattttttttgagaaaagaggttttttttattgtggagtttagaatatataagtagaattttatgttcgttttgataattttttaaaaggaaatttaggaatatttttttttaaatttttttatatatagatatgtgtatgttaaaaatttataaaatggtattatatttttgttatttaaattttaaagttatatttaataaatgttttgtttttatgtaaatagatttttaaaattattaatgtattataatattttttagatagtatagttaaatttatgatattttattattttatattttttaagggatatgaatatgtatatgaattgaggagatatgaattttttttagagtgattatattatatattaaatttagaaagagatgttttttattttaggagataggatatagtataaaatgggattttttagtttatgttatattttggttttttttggtgttagatttattattttattttttaaatatggtagttaatatttgtattgttttttatatatttaaatatttaaatgtgtataaatttttacgtaaagtaaagaaatttaaggtgcgtttttaaattttacggatttaatttatttttttatttggtagggtaagaatgtgttttttatgaagaaaattggtttcgggagaaattttatttatttagggagtttgtggggaaggttggtttagatttttaatttataaagttttttataagttattttggttagtttttttagaaaatagagaaaatgagagtttgttaggtacgttatattaaattatattatggtaattaaggaattagattatacgggtgtttggggtgttaggtaattcgtataatttatgttatggagtttcgttagtgtggtttaagtttaggaaggattattttttaagttttattatggtttttagagttttttttttttttttatattatattaaatttttaagagtttaagagtagagtttgtgttttttttttgttttattcgtgtttattggttttattttggttgggttgtgtttacgtggttttaagaataagtattatttatttaattgttatgaaataaattaggttgataaatttaattagtttaattatggagtattaattttttattaatttaggattgaatttttggattagtaaatttatttgggtttgtttgttttattttttttttttagttattgatttgatttttattggattttagaatgaaagttttaaaatttggtgtagttgtttttataaagatttttgtttttgggtaagagaaagtttttttgttaacgattaaagttaatttttttagatgagttttttggttggtagaaggaaaggaaatttttgttttgttttagtagagttttagtagttggtttttgggtgtggttttgatttttcggtttgcgtttttattatatggtgttggcgttatatgtttttcgttgtgtttgagtagagtatttgtttcgtttgatttacgttattagcgcgtagattcgttttgttttgatagcggtttagattttatacgggtatacgtgttattcgttagtacgcggatttgtgtaatgatatgttttatgtatagattcgagttttattttttttttatagtaggtgtggtcgtacgttttgacgtcgatttgtgtagtgtattttcggatatttgttgatggggttgggttggattatgtttttgtgatttaaatgtaagttttttttatgtatagtgaattattattaaacgttgtaaatggatttttgaatatatattttagtagatgattttgtgttataattattagtaaataaatattaaaatattgtttaatatttttttttgttgtgaatagattgtgtagagtgaaataaggaaataatagttatggcgatatgtgtttttttaattgtgttatatttgtaataaaaatgtgtgttttgtgggaaatggagtgaaaagtaaggaggatttttgtttttataaatttaggtgtttatattcgaataaatttttatatagagtagtaagtttagaaaattgtttttggtttttattttaggttttagtttgtgtgtggagaaatcgaatatgtatttatattttttttttttttgtaagtatagttttattagtataaggatttttttgaattattttttttgtttgatatttaaattagtgattgttggaagaaataagaataattattgaaattagtttaggaaatttgtgagtgttttattttattttttaaatatatatatatttttgtttttttattttaagattaagaagttatgtaatttgataatgtatttttttttgataagttttgatattattattgttatttttttttttattttttttttttagtatttgttagaaataagagtagggtgatttttatgtgaatttgttttttttttatttttttagtaaaagatagggataaaagtttgtaatggatagagatgttttaaaatatgtttgaaattttatatttaaaataaattatttgaaagtatttttagattgaagattatatataaaataaaggtgtttttgtagttattagattgggtttttaaaattttaattaatttatatttataataatattttttaattttttttttagtattatataggaaattggtagatattgagatggattttaatggttttatattgatgaaaatagtattatataaaagtaggggaatattagaaataaaaataattgtttttaaagatttatataatttttttttttataaaaaaaaagatgtattgtaatatatgaaaagataagattttttgttaaaagtgtgagagaatgttcggtggttttaaatgatagttattttttgttttttttttttgttagagtttttttttatttttgtaattttttagttttttcgattagtttgtttttagagggttataaagtattttttttaagttattatagttaatacggtgatatgagtatttaatttgtacgcggtcgcgttgtttttggtttcgcggaagttttgagtagcgtagcgttttcgtcgtacgtaaggttgtagtttcgttttaggttagagttttaggagagcgtttttcgcgtttataggcgtttttgttttttcgttttttttttttttttttaaaagttaagaggtaattatttggtttttgtgtaaggtaaatttttttagatgttatttttaaatataggtttttattaatattagaggttggtttggtgtggtgtagggcggttttttttttttttggcggatattgtgttttcgcgcgttggcgttgtattatatttggaagttaggcgggtagggtagagatttcggtttttgcgttttttttagtttttagagagcgtggatcgcgggcggggtttatcgagcgaggttattttttttgaaaatatttaaatatttttttttttttttattgaaattttaaaaaatagtttattttgaattagaataatttagtttgataatagattttttttttgtttatagttgttttagagggaggagttgaaatttgaatttttttagttgtgattggattttttttgtaaaagagaggaaaaaaaattttttttagttaaaacgggtttagttcgtaaaggagtcgggtgattttagaggcgtcggttcgttcgtttgtcgtatttgagtacggtttttgttcgagtttggttcgtcgcgatgttgtagggatcgtcgtgttttttcgtcggatcgttattcgcgtcgggcgttcgttagattcgttggtaagatgtcgcgtttttttttggttaagaagtattttaacgtttttaaaaagttaaattatagcgaattggatatatatataggtaaaaagagaaaaatatatttagaattacgtatttagagttttgtaaatatgaatttacgtattattttttaaatattattataaaagagttaaagatttaattgtttttttttttaatagtgttttgaaagggagtttatatttttttgattatttagggttcgttttaatttaaaatttttaaaatttttgattaataaggaatattttatttaaatttcgtagtttcgtttgttaaagtttgtgtatatatgtataatgagtatgtgaaagatgagtaatataaggattgaattattgcgttttttatgtattaagtttttttttttttagaaggcggtttgatgtaggtatatttttgtatttacggtcgtaatatatttaaatagtttatacgtaatatggaaaataatttttttgtatgtttaaaaataatgttgaggttttttttttttaatggggacggcgaaggtattggtttggttgtattgtttgattttagagtatttatagtttcgtgtagttgttagtttatgtgtgtattaagtatagtaatttcgtaggtgttagggtggaaatgaaatattttattagtgtgtatgtttttttaaatgggtttattttttttttaagaaaattacgtgtgtgttgttaaatatttttttagtgtgtgtatatttgcgtgtggatttatttttaattatttttgttttaattttttttttttttttttttttttttagt

SEQ ID NO: 158 - DNA, 5825 bp, Artificial Sequence
  chemically treated genomic DNA (Homo sapiens)
attgggaaagaaaagggagggagagaagattaaggtaaaaataattaaaaataaatttatacgtaagtatatatatattggaaagatatttagtaatatatacgtgatttttttaggaagaagatagatttatttaggagggtatatatattggtaaaatgttttatttttattttggtatttacggagttattgtatttaatgtatatataggttgatagttgtacggagttataggtgttttgaagttagatagtgtagttaagttagtgttttcgtcgtttttattgaggaaggagagttttaatattatttttaaatatatagaaaagttgttttttatgttacgtatgggttatttaggtgtattacgatcgtgagtataaagatatgtttgtattaagtcgttttttaaaggaaaggagatttagtgtatgaaaaacgtagtaatttaatttttatgttgtttattttttatatatttattatgtatgtatatataggttttagtaaacgaagttgcgagatttgaatgaaatgttttttgttagttaagaattttaaaagttttgaattaaaacgaattttaaatgattaaaagaatgtaagtttttttttaggatattgttaaaaaggaaaatagttgaatttttggtttttttgtaatggtatttgaagggtaatacgtagatttatatttgtaaagttttagatacgtagttttagatatatttttttttttttatttgtatgtgtgtttagttcgttgtagtttggttttttggaggcgttgaaatgttttttgattaggaaggagcgcggtattttgttagcgggtttggcgggcgttcggcgcggataacggttcggcgggaggatacggcggtttttatagtatcgcggcgggttaggttcgggtaggggtcgtgtttaggtgcggtagacggacgggtcggcgtttttgaagttattcggtttttttacgaattgagttcgttttggttgggaagggttttttttttttttttttgtaagagagatttaattatagttggagaggtttagattttagtttttttttttgggatagttgtgaatagaggaagaatttgttgttagattaaattattttggtttaaaatgggttgttttttgagattttagtggagaggaaaaaaagtgtttaagtatttttaagagaggtaatttcgttcggtgagtttcgttcgcgatttacgttttttgggagttaggaggggcgtaggagtcggggtttttgttttgttcgtttggtttttagatgtggtgtagcgttagcgcgcggggatatagtgttcgttaggagaaggaagggtcgttttgtattatattaggttagtttttggtgttaatgagagtttatatttggaagtggtatttggagaggtttgttttgtataaagattaaataattattttttggtttttgaaaaaggaagggggaagcgggaagataaaggcgtttgtgagcgcggaggacgtttttttgggattttggtttggagcgggattgtagttttgcgtgcggcgagggcgttgcgttatttagggttttcgcgaagttaggggtagcgcggtcgcgtgtaaattaagtatttatgttatcgtgttagttatggtggtttgaaagaaatgttttgtagttttttaaaggtaggttgatcggaagaattggaagattgtaaagataaaaaggaattttggtagagaaggggggtaagaggtaattgttatttggaattatcggatatttttttatatttttgataagagattttatttttttatgtattatagtgtatttttttttttatgggaaaaagggttgtatgggtttttagagataattatttttatttttaatatttttttgtttttatgtggtgttatttttattagtataaagttattaaaatttattttagtatttattagttttttgtataatgttaaaaaagaaattgaaggatattattatgaatatagattgattaaagttttaagaatttagtttagtaattgtaaaaatatttttattttgtgtatggtttttaatttaaaaatatttttaggtggtttattttaaatataaaattttaagtatattttaaagtatttttgtttattgtagatttttatttttattttttgttaaaagaataaggaaagaataaatttatatgaagattattttatttttgtttttaataggtgttggaggaaaaaagtgaaaaagaaaataatagtggtgatgttaagatttgttagagaaaagtgtattgttaggttgtataattttttaattttggaatgagaaaataagagtgtatgtgtgtttggagggtgaggtggggtatttatagattttttaagttaattttaatgattatttttattttttttaatagttattaatttaaatgttaaatagagaaaataatttaaaggaatttttatgttaatggaattgtatttgtaggagagaggaaaatatgaatatatattcgatttttttatatataaattggaatttggagtaaaagttagaggtagttttttaagtttgttattttatgtgagggtttgttcggatgtaggtatttgggtttatgagagtaggagttttttttgttttttattttattttttataaaatatatatttttgttatagatatagtatagttgagaaaatatatatcgttatggttattatttttttgttttattttatatagtttatttataataaagaagagtgttagataatgttttggtatttatttgttggtagttataatataagattatttattaaaatgtgtatttaaaaatttatttataacgtttaataataatttattatgtatgaaaaaagtttatatttggattatagaggtataatttagtttagttttattagtaggtattcgagggtgtattgtatagatcggcgttaggacgtgcggttatatttattgtgaggagaggatggggttcgggtttgtgtatggggtatgttattatatagattcgcgtgttagcgagtaatacgtatgttcgtgtgaggtttgggtcgttgttagagtagggcgagtttgcgcgttgatggcgtgagttagacgaaataggtgttttgtttagatatagcggagggtatgtggcgttagtattatgtggtaaaaacgtaagtcgggaagttaaggttatatttaaaggttagttgttgggattttgttaagataagatagaggttttttttttttttgttagttagagggtttatttggaggggttggttttggtcgttgataaaaagatttttttttgtttagggatagaaatttttgtggaggtaattgtattagattttaaagtttttattttggaatttaatagaagttaaattaatgattgagggggaaaaatggaataagtaaatttaagtgggtttgttaatttaaggatttagttttaggttggtgagaaattggtgttttataattaggttgattgggtttattagtttaatttattttataataattaaataaatggtgtttgtttttagagttacgtggatatagtttagttagggtgaagttagtgggtacgggtaagataaaaggaaggtataagttttgtttttaggtttttgagagtttaatgtagtgtagggagaaaaaaggaattttggaggttatagtgaggtttaaaaaataattttttttaggtttgagttatattggcgagattttatggtatgggttgtgcgggttgtttggtattttagatattcgtataatttaattttttaattgttatgatgtgatttgatgtgacgtatttgataggtttttattttttttgttttttgaagaagttgattaagataatttgtggaaaattttgtaagttaaagatttgggttagttttttttataggttttttggatgggtggggtttttttcggagttagttttttttatgaaagatatatttttgttttgttaagtaggggaataaattagattcgtgaggtttgggaacgtattttgggtttttttattttgcgtggagatttgtatatatttaggtatttaggtgtgtaaaaagtagtgtaagtattgattattatgtttaggaaatggagtagtaaatttagtattagaagaaattagagtgtggtataggttgaaaaattttattttatgttgtgttttattttttaaaatgaaaggtatttttttttaagtttggtgtgtggtatgattattttggagggggtttatatttttttaatttatatgtatatttatattttttgaaaaatatgaagtgatgaaatattatgagtttggttgtgttatttggagaatattataatatattagtaattttaaaaatttatttatatagaaataaagtatttattaaatataattttgaagtttgaatgataagggtgtgatgttattttgtgggtttttaatatatatatatttgtatgtaaaaggatttaggaagaaatatttttaaatttttttttggaaaattgttagagcgggtatgggattttgtttatatattttgagttttataataaggagaatttttttttttaaagggaatggatggtattcgtttatgtattttatatatgtaagtatatgtgtttggtgatgttaatagggttaaatatgagtatgaatatatttttgtgtgagtatttatatgtttgaatgttgggaaaataatagttaaaaatggtgttaggatgtttttttgttgtttaggagtttttattattttttgcgtgtttttagtgttatgtttagtaggttaatagttattaggtatttgcgtttgtttggagttagtgttaatgttaatagtttaataagtattattatatatgattagtaaatatttaagattattttaaatagaaaatttttaatttgggaatagtattttaatgaaatttgttttttgttaagttatttgtgtttagaattttatttttagttatgtttgtatgattttatttttttttgggtggatagaatatggttaagtgtattatgaaaagtaagagatatttatttttttagtgttttgtgtgtattttgtggaaagtgttgatgatattatttgtaaaatgaaaaagaaagattagggagtgttgaatttgtgtgtattttaagcgatagtttagggatatgtggttgtaaagagatatttattggttagttttagaagatttattattttttttgttttttttttttttttcgtaattttttaataaggtttgttatttagtggaaaatgggtggatttgatttaattttgagaatattaatttgattttgttttgtaattgttataattttagatggatattatataaatttgttgaatttattaatgtatttataatttaaagtgatatatttgtatttgtagaaatatgtataatatttatataataaattatgatgattttataagataggcgagaaagggaatgttatgacgttattagtttgtgtagttaagaaggaagtaggtagaaatagttagtattatattggaggtaagtgagtaattttttggattttttgttatgtttgtatgataatttttaaggtagaggaattttaaaaatgggaaattaagtttgagtttagtttttagggtatttagaatgatttttttttagtttgtttgtttttaaggttatgtatttcgttgttggaatttgttattttatttggtttgtt

SEQ ID NO: 159 - DNA, 8801 bp, Artificial Sequence
  chemically treated genomic DNA (Homo sapiens)
gagtttttgataagtgagtaggaggcggcgggtggttgttttaaattttgatttatgaaaaaaaattagaatttatcgatatattttgttattcgttgagcgtttaagtttttaattaaagaaggtatagtggtagggagtggtaggggggtcgggagaggaggaagggggagaagaaagaagattgattatttttacgattttttatttcgtttcgcgggcgtagggaggtttagcgatgttatttggcggttgtttttttttagattgggagtcggttggttgtagataaatttaggtttttttcgggtgtcgtgtttttgtttttagaatagaagtagaagtttgtatttatgtttgtaatttaagtggttttgtaaatattcgttttttgtttgtttttttgagaaaatcgaaggaaaggaataatgagttggtattggtatgaatagtttaagtttattgtgtgttagttattggttatgagaggaaaatggtataattgttagaaatgtaggttttttaatttttagtttattttagtgataaaaataaatgttaggttttatttattttagaattttattttgatattttgtaaatatgagttatttttatatattattttttaatgtacgtatttttatttttattacgcgttgagtttagttataatgtaatgttattagtttaaaaggatgaagtgtaagttatgtttgtttatttgattgagaagtaaattagttttatatggaggttttttttttataaagtgtggaattaaaaaaattggcgttttttagttgataaaggttaatgatattagattttttagggttttttttttgttaggtaaagtaataattatatagtttttttttttttttattttatttgaattgaatatttgttaggtttgattagcgtttataattatagtttttataattaaggtaaggtaaaattttgtaaattagtgtaaatttagatttgttaaattaatttttatttaggtttttttttttatgttaaaggaatatattaagtagtggaatagaattttattttatttatgttttatattattgtatggatgtgagattttatgttgtgtagatgtgtgagagtagaagaaatgtattagtagatattatatttatattttaaatggaattttattatttaagggaataaaataaaatatttaatttaaaattggaaatgtttaatattattgttaataaagatagtttattattttaaattaggattttttttttttgtaaaattattttggtttttttttaatatagttaaaagattagtattaagaattattttatgtattgtaaagttagtagagggaatattgcgtattgatttagtaggggttattaaatatttggtatttggggaaaaaaatgttagtaatggagaattgattatagagtatatgaagttagggaatgagaagggagaaatttttttttattatttggtattgagaggtttaatatattttagtgtgtatatatttagttggttataaagatgattttaataaaagggtattcgttatatgtttttttatattttaagagaattaatttattagaatagatttattttagaagtttaggtatttgtgtaatatataaatatatatgtagtaattataaagttaatggaagttattgatattatattttattaagtttaagaggaaatttttttttttattttaattttttttgaaataaggaggtattttatatttagggggatattatagttttattggtagtttttttttttggtggaatgtaatataatggtgtgttttaaaatttgttggatttgttgaaatatagaaaatatatgtaataaaagaatgaggttagtggttgtgttttagtatattttttaaaaaatttatgtgttttaagtagaaatatatatgattgttttaatttttatttttttttattatattcgatgatggaagtataaatgattgagaaatataattaataatgttgatatttaatttgattgaattattaaattagttatatttttaaattattagttagtataaatttaaaaataaatatttttttttattttagtgaaaatattgattttatagataatagtttttttaaaataatttttttttgttagattggtaatatttaaggatgtgtttttatgtatattagagaaaatgtagtatataatatagtaatattgttatgtaaaaaaggtgtttgtgtgtttttggtttgggtttttttttttttaaggatttgtttttttttttttaaaaaaattatgtaatataagtagttaatcgttaaaaattatttgtttttatttataaaaatagttttgtttgtggttgatttttatagatttagttagatggttatatagggtgttttttttagtaaaattttaagtttgataatttgggtttattgttagtttatatattttaaaagtttgataagatatatagaaatttattatttagtattagtttaatttgaattaaaagtcgatttaattattttggattgattttatttaattatttatggttagtttgaagaatattagttttttattatagtgttaaggaaagttgatttttattataattttaatttttagatattggaaaataagtaatttttgtagttaacgtttattttgaatattttggtattttttttttgttatattttttttagtattttttatggagttttttttttttaaaattaatggaatggtagggttgttattattgtttttttatggtttatattaatgatttgtgattattttttttttttttttgagatagttatacgttattatttatattggagtgtagtggtttaattttagtttattgtaattttttgggtttaagtaattttttcgttttagtttttcgagtagttggaattataggcgtatgtatttttgtttagttaattttttaattttttaatttttagtagagatagggttttattatgttgattaggttggtttcgaatttttgatttgaagtgatttatttattttagttttttaaagtgttgggattataggcgtgagttatcgcgttttgtttgttattatttttttatataagtggttattttgttttagttttttgaataatatgtagtttttattaggagtgtgtttggtatttgaattagaaaggaagatattagtatttattgagggtttataatatattaggtgttttatagttataaatttattgaatttttataataattttttataaagtagtttttagtgtttttatataatagatgaggaaaattgagatttggttatatttttatagttataaattattaagaaggattagtagttaggtttattatgaattcggaggttttatttttttttgttattagttattatttttttttatagtttttttttgttttggttttttagtttttttcgatttaagtaataagaggaaatatataagaaggaaaggaggaagatggttttgggaggaggagagggaagagagtgaagtaatttttaattttgaaaatagggaaaataaatatttagaaagtaaaatcgatttttattttttatatgttattatatattttatataaaattttggaaatttgtttattgaggtaattacggagtattatttaatgtgttttaagggaaagtttttttgtttgggttatgtaggatttatagggagtttaaattattaaataattatagttgatttttgtttggttaagagagtaagtaattattgtaaagtttttttttttgttttttataaatagtataaaaacggttttgaagggatttatataatatattaatatttgtgttgtatttagagttgttaaaataattgtgatgataggtgtttaggtattatttttttaatggtttttaatatttattgatttattgttttgtggttttttttttttttttatagttttggttttaagaaagagttggggaatagattttgtattagaggttgattttttattttaatgttgaaaagaattaataaaaataattatttggtttttaagtagaaagtttttatttatagtattttatttttatttcgtttcgttttaagttttttgttatttaatataatggttagaatatattttcgtttttttttttaataattttatgtattaatattttttttatatattatatatatacgtacgcgcgtatatatacgcgcgcgtatatatatagtaaaaggaaaaaagaggtagtagaaattttagttgtatttttagtttttttaaaaagtttgttttgtaaattggaatgaggttagatttggagttttttattgtacgcggagattattattgtatcgggttttaagttaatgggaagttcgggggaggggtttggtatgaggaagcgttggttatagtagttgattggttgtagttaagattgtgaaaggataaagaggcgcgaggcggaattggggtttgttttaagttgtagtaagagaaattgtgtgtgaggggaagaggtttgtttcgttgtcgggtttttagtttttgtacgttttttaagagtttgtattggaggaatttttgttattattagttttttttttgtagaagggagggggaaatatatatttatttatgttagtttgttgtatgtaggttttttggttttttattttgtaataaaataattgtattaattttttagtgtcgatttcgtttatagagagttttggagttatagttttttttgttttgtattgtaggagagggattaagtgttagagattatgtcgtttttttgagttatcgagagcgttcgtgaattggaattaattgttttagggaaaaagaaaaaaaaaaaaaaaagatttgtttgggaggtcgcgagaaatttgtattggaagttttagtaattagtattcgagaaatttttttttattttagtacggtttttagatttagtcgagagatagtaaattgtagcgcggtgagagagcgagagagagggagagagagattttttagtttgggaattataatttttttgcgagaggcggagaattttttttttaaattttttggggatttttttttttttatttattttcgtttttgcgaggagttgaggggttagttcggtcgtcgcgcgcgttttttcgttcggcgtgtgtttggttcggggaatcgggagggttcggcgatcgcgcggcggtcgtcgcgagggtgtgagcgcgcgtgggcgttcgtcgagtcgaggttatggtgtagtaaattaataatgtcgagaatacggaagcgttgttggtcggcgagagttcggattcgggcgtcggtttcgagttgggaatcgtttttttttttacgttcggttttatcgtttttacgggcggtaaggtcgacgattcgagttggtgtaagatttcgagtgggtatattaagcgatttatgaacgtttttatggtgtggtcgtagatcgagcggcgtaagattatggagtagtcgttcgatatgtataacgtcgagatttttaagcggttgggtaaacgttggaagttgtttaaagatagcgataagattttttttattcgagaggcggagcggttgcgttttaagtatatggttgattatttcgattataagtatcggtttaggaagaaggtgaagttcggtaacgttaattttagtttttcggtcgtcgttttttttaagtcgggggagaagggagataaggtcggtggtagtggcgggggcggttatgggggcggcggcggcggcgggagtagtaacgcggggggaggaggcggcggtgcgagtggcggcggcgttaattttaaatcggcgtagaaaaagagttgcggttttaaagtggcgggcggcgcgggcggtggggttagtaaatcgtacgttaagtttattttggtaggcggcggcggcggcgggaaagtagcggttgtcgtcgtcgtttttttcgtcgtcgaataggcgggggtcgtcgttttgttgtttttgggcgtcgtcgtcgattattattcgttgtataaggcgcggatttttagcgtttcggttttcgttttttcggtagtttcggttttcgtagcgttcgcggtttcgggtaagtatttggcggagaagaaggtgaagcgcgtttatttgttcggcggtttgggtacgtcgtcgtcgttcgtgggcggcgtgggcgcgggagtcgattttagcgattttttgggtttgtacgaggaggagggcgcgggttgttcgttcgacgcgtttagtttgagcggtcgtagtagcgtcgtttcgtttttcgtcgtcggtcgttcgttcgtcgattatcgcggttacgttagtttgcgcgtcgtttcgttcgtttcgtttagcgcgttttcgtacgcgtttttttcggtttcgttttattttttttttttttttttttcgggtttttcgtttttcgacgacgagttcgaagacgatttgttcgatttgaattttagtttaaattttgagagtatgtttttgggtagttttagttcgtcgtcggcgttcgatcgggatttggattttaatttcgagttcggtttcggttcgtatttcgagttttcggattattgtacgttcgaggtgagcgagatgatttcgggagattggttcgagtttagtatttttaatttggtttttatttattgaagggcgcgtaggtagggagaagggtcggggggggtaggagaggagaaaaaaaaagtgaaaaaaagaaacgaaaaggatagacgaagagtttaaagagaaaagggaaaaaagaaagaaaaagtaagtagggttggtttcgttcgcgttttcgtcgtcggattaaggagcgcggcggcgttttggattcgcgtttttattttttattttttcgggtcggggatttattttgtttagtcggagggacgcggaggaggaagagggtagataggggcgatttgtgattgttgttattgatgttgttgttgatggtaaaaaaaaaaaagcgatttcgagtttgtttttttttgtttgaagagatttttttttttttttaacgagttttcggatttgtttgtatttttagtaagaaggcgagttagttttttagagatttgaaggagtttttttttttttgtattattattttggttttgttttattttgttttttggttaagaaaggaggggagaatttagcgtatttttttttttttttttttaaacgcgtgatgaagatagaaggtttcggggtgacgaatttggtcgatggtagatgttttgggggaacgtcgggattgagagattttacgtaggcgaattttcgtttggggtttttttttttttttttttttttttttgttttttttgtagtcggaggaggagatgttgaggggaggaggttagttagtgtgatcggcgttaggaaatgattcgagaatttcgttggaagcgtagtagcgggagttaggggcgggggcggaggaggatacgaattggaagggggtttacggttaaattgaaatggatttgtacgttggggagttggcggcggcggttgttgggttttcgtttttttttttacgtgaaattagtgaggtgagattttttagatttcggaggcgtggaggagaggagattgtttgatgtggtataggggtagttagtggagggcgagtggtttcggaaaaaaaaaaagaaaaaaagaaaaaaaaagaaaaaaaaaagatttttttttttttttaatcggaatcgtgatggtgttggattattttaatggtggggttaatatagtatgttattttgtttattttttaaagatttttgtataagattgttgagtagtttttaaaatagtgtaggataatataaaaagtagatagatggcgttatgtttgatttttataacgaaattattattagtttttttttatttttaattttttaaaggatttaaacgtaatttaaatttgtgttggattttaaaaaaataatttaggattaaatttttttttagtgtgtgtgtttattttttataggtgtaaatgagaagacgtgttttttttttttatcgatgttttattttcgtatttttttttttttgtaaatgtaattagatgttattttatatgtggacgtatttatattggttaaatatatttttttttttgttttttttttttttttttttttttttattttttttatttttttattttttttttttttttttttttttttttttttttttttttttttttttttttggtagttgttgttatttacgttattttacgttttttttattgaagggttagagttttaatttttaattttttatatttaaatgtagatttttgatatttttaaaaaataaaaaaagataagagagatgaaaacgtttgattatttttttagtgtatttttgtaaaaaatatataaagggggtgttaatcggtgtaaatcgttgtttggattttttgattttataatagggcggttggttaatattttatatagtttaaaaaattagtttttaatttttttatgtttatattttaatttgtaggttttttaaagtgatagtattttttaatttgttattagtgtttatttttcggttttcgttttgtaaaaaggggaggagaattagttaaatattgtaagtttttaagaaaaataaagttttaaacgaaatattgttttg

SEQ ID NO: 160 - DNA, 8801 bp, Artificial Sequence
  chemically treated genomic DNA (Homo sapiens)
tagagtagtatttcgtttaaaattttgttttttttaaaagtttatagtgtttggttaattttttttttttttttataagacgggggtcggagggtggatattggtggtaggttaagggatattgttattttaagaagtttgtagattgaagtgtaaatatggagaaattaggggttgattttttaaattgtgtgagatattaattagtcgttttgttataaaattaggaaatttaaatagcgatttatatcgattaatattttttttatatattttttataaaaatatattgagaaaataattaaacgtttttattttttttgtttttttttgttttttaaaagtgttaaaagtttatatttaaatataaaaaattaaaagttaaaattttagttttttagtgaaggagacgtaaaatggcgtgggtaataataattattaaaaaaaaaaaaaaaaaaagaaaaaaaaaagaaaaaaaggaaaaggaaggaataaagaaataaaggaagtaaaaagaaaggaaagaaaaaaagggataaaagaaaaaatatgtttggttagtataaatacgtttatatataaaatggtatttgattatatttataaggaaaaagaaatacgaggatggagtatcggtgaaggaaaaaaatacgtttttttatttatatttataaggaataaatatatatattgagaaaaaatttggttttgaattgtttttttaaagtttagtatagatttgagttgcgtttgaattttttaaagagttaagaatgaaaaaaagttggtgataatttcgttgtaggaattaaatatagcgttatttatttgttttttatattattttatattattttaaaaattgtttaatagttttatatagaaatttttaaaagatagataggataatatgttatattaattttattattgaaataatttaatattattacgatttcgattaagagaagaaaaaaatttttttttttttttttttttttttttttttttttttttttttcgaaattattcgttttttattgattgtttttgtattatattaaatagtttttttttttttacgttttcggggtttgggaagttttattttattgattttacgtagaaaagaaggcggaggtttagtagtcgtcgtcgttagttttttaacgtgtaaatttattttagtttgatcgtgaatttttttttagttcgtgttttttttcgttttcgtttttagttttcgttgttgcgtttttaacggggttttcgggttattttttagcgtcggttatattggttggttttttttttttaatattttttttttcggttgtagagggggtaaggggaaaagagggaggaaaaaaaagttttaaacgggaattcgtttgcgtggagttttttagtttcggcgtttttttaaaatatttgttatcggttaaattcgttatttcggagttttttgtttttattacgcgtttaaaaaaagggggggaggggtgcgttgggtttttttttttttttttgattaagaagtaaaataaaataaaattaaggtggtgatgtaggaagggggagatttttttaagtttttagaaaattaattcgtttttttgttgggggtgtagataagttcggaagttcgttggaagggggagggggtttttttaagtaaaggggagtaaattcgaagtcgtttttttttttttgttattaataataatattaataataataattataggtcgtttttgtttattttttttttttttcgcgttttttcggttgggtagagtgggttttcggttcgggaaggtgggggatgggagcgcgggtttaaaacgtcgtcgcgttttttgattcgacgacgagaacgcgggcgaagttagttttgtttattttttttttttttttttttttttttttttaaatttttcgtttgtttttttcgttttttttttttattttttttttttttttttttatttttttcggtttttttttttgtttgcgcgttttttagtaggtgaaaattaggttggagatgttggattcgagttagtttttcgagattatttcgtttatttcgggcgtgtagtagttcgggaattcgaagtgcgagtcggagtcgggttcgaagttaaaatttaggtttcggtcgagcgtcgacgacgaattgaagttgtttagggatatgtttttaaagtttgagttggggtttaggtcgagtaggtcgttttcgaattcgtcgtcggaggacgaggagttcgaggaggaggaagaggaggagtgggacgaggtcgaggaggacgcgtgcgagggcgcgttggacggggcgggcgaggcggcgcgtaggttggcgtagtcgcggtggtcggcgggcgagcggtcggcggcgggggacgaggcggcgttgttgcggtcgtttaggttgggcgcgtcgggcgagtagttcgcgttttttttttcgtataggtttagggggtcgttggggtcggttttcgcgtttacgtcgtttacgggcgacgacgacgtgtttaggtcgtcgaataggtagacgcgttttattttttttttcgttaggtgtttgttcggggtcgcgagcgttgcggaggtcgaggttgtcgaggaggcggaggtcgaggcgttgggagttcgcgttttgtatagcgagtggtggtcggcggcggcgtttaggggtagtagggcggcggttttcgtttgttcggcggcgaaggaggcggcggcggtagtcgttgttttttcgtcgtcgtcgtcgtttgttaggatgagtttggcgtgcggtttgttaattttatcgttcgcgtcgttcgttattttggagtcgtagttttttttttgcgtcggtttggagttggcgtcgtcgttattcgtatcgtcgtttttttttttcgcgttgttgttttcgtcgtcgtcgtcgtttttatggtcgttttcgttattgttatcgattttgttttttttttttttcggtttggaggaggcggcggtcgaggagttggagttggcgttgtcggattttattttttttttgggtcggtatttgtagtcggggtagttagttatgtgtttgaggcgtagtcgtttcgtttttcgaatgaaagggattttgtcgttgtttttgagtagtttttagcgtttgtttagtcgtttggagatttcggcgttgtgtatgtcgggcgattgttttatgattttgcgtcgttcgatttgcgattatattatgaaggcgtttatgggtcgtttgatgtgtttattcggggttttgtattagttcgggtcgtcggttttgtcgttcgtggaggcggtggagtcgggcgtgggggaggaggcgatttttagttcgaggtcggcgttcgagttcgagttttcgtcggttagtagcgttttcgtgttttcggtattgttggtttgttgtattatggtttcggttcggcgggcgtttacgcgcgtttatattttcgcggcggtcgtcgcgcgatcgtcgggttttttcggtttttcgggttaagtatacgtcgaacgggaagacgcgcgcggcggtcgaattggttttttaatttttcgtaggggcggaggtgggtaaagagagaaaagtttttaaaagatttggggaaggagtttttcgtttttcgtagaggagttatagtttttaggttggagagtttttttttttttttttttcgtttttttatcgcgttgtagtttgttgtttttcggttgagtttggagatcgtgttaaagtagagaggagtttttcgaatgttggttgttgaagtttttaatgtaagtttttcgcggttttttaggtaagttttttttttttttttttttttttttttgaagtagttgattttagtttacgagcgttttcggtagtttaggaaagcgatatagtttttagtatttagttttttttttataatgtaaagtaaaaaagattgtggttttaggattttttgtgggcggaatcggtattaaggagttggtgtaattattttgttgtaaggtaggaagttaaaaagtttgtatgtaatagattggtatgaataaatgtatgttttttttttttttttgtaagaagggagttggtaatggtaggagtttttttagtgtagatttttaaagagcgtgtaagaattagagattcgatagcgaaataggttttttttttttatatatagttttttttgttgtagtttagagtagattttaatttcgtttcgcgtttttttatttttttatagttttggttgtagttaattagttgttgtaattaacgtttttttatgttaaatttttttttcgggttttttattggtttggaattcgatgtaataataattttcgcgtgtaatgagaagttttaaatttgattttattttaatttatagagtaaattttttaaaagggttagaagtatagttgagatttttgttgttttttttttttttttgttgtgtgtgtgcgcgcgcgtgtgtgtgcgcgcgtgcgtgtgtgtatagtgtgtgaagaggatgttaatgtatgaaattattaaggggagagacggaaatgtattttaattattatgttagataataaggggtttggaacggggcggggtaagggtgaaatattgtaaatggaagttttttgtttaaaagttaagtgattatttttattagttttttttagtattggaataaagaattagtttttggtgtaaaatttgttttttagtttttttttaaagttaaagttgtaaaggggaagagaaagttataaaataataaattaatggatattgaaaattattaagaaagtggtatttagatatttgttattataattattttaataattttaggtatagtatagatgttgatgtattgtgtaaatttttttagaatcgtttttgtgttgtttgtggaaggtagggaagaggattttgtaataattgtttatttttttaattaagtaagggttaattatggttatttaatgatttaaattttttgtaaattttgtatagtttaaataggggagtttttttttgaaatatattaggtagtgtttcgtaattattttaataggtagatttttagagttttgtataggatgtataatggtatgtaaaggatggaaatcggttttattttttaaatatttgttttttttgtttttaaaattaaagattgttttattttttttttttttttttttttaaagttatttttttttttttttttttatatatttttttttgttatttgaatcgaagggaattgaaaaattaaggtaaagagaaattgtagaaggaggtgataattggtagtagaagagaatggggttttcggatttatagtagatttggttgttaattttttttaatggtttgtaattatggggatgtggttaagttttagttttttttatttattatatgggaatattaggagttattttatagagggttgttgtgagggtttaatgaatttgtgattatgaagtatttgatgtattgtaagtttttaatgaatattaatatttttttttttaatttaaatgttagatatatttttagtaaaagttgtatgttgtttaagaggttaaaatagaatagttatttatgtaaaaaagtaataataggtaggacgcggtggtttacgtttgtaattttagtattttgggaggttaaggtgggtggattattttaggttaggagttcgagattagtttggttaatatggtgaaattttgtttttattaaaaattaaaaaattaaaaaattagttgggtagggatgtatgcgtttgtaattttagttattcgagaagttaaggcgggagaattgtttgaatttaggaggttgtagtgagttaagattgagttattgtattttagtgtgggtgatagcgtgtgattattttaaaaaaaaaaaaaaagtaattatagattattgatgtgaattatagaaggataatagtggtaattttgttattttattgattttaaaagaaaggaattttatgaagaatattaagaagaatgtggtaaagaaaggatgttaaggtatttaaaataaacgttggttatagaaattatttgttttttagtgtttgaaaattagaattgtagtaaaaattagttttttttaatattataataggaaattaatattttttaggttaattataagtggttaggtaaagttaatttaaaataattaagtcggtttttgatttagattaaattagtgttgggtagtaaatttttatgtattttgttaaatttttaaagtatgtaggttggtaataggtttaggttgttagatttagaattttattggaaagaatattttatgtagttatttgattggatttgtaaggattaattataagtaaaattgtttttgtgggtaaaagtaaataatttttgacgattagttatttgtattatataatttttttaaaaaaggagaaataaatttttaaaaaaagaaaaatttaaattaaaaatatataggtattttttttgtataatagtgttgttgtgttatatattatattttttttggtgtgtatagaaatatatttttaaatgttattaatttgataaaaaaaaattattttaagagggttattatttataagattaatatttttattagaataaaaaagaatatttatttttgaatttgtattaattaatgatttgagggtgtagttagtttgataatttagttaagttgagtattaatattattgattatattttttagttatttatgtttttattatcgaatatgatagggaagagtggaagttaaagtagttatatatgtttttgtttaaaatatatggattttttaaagggtgtattaaaatatagttattggttttatttttttgttatatgtattttttgtattttaataaatttaataaattttaagatatattattatattatattttattaaggaagaaagttgttaatgaaattgtgatatttttttagatgtaggatgtttttttattttaggaagagttgaaatgaaaagaaaaatttttttttagatttgatgaaatatggtattagtaatttttattgattttataattattgtatatatatttatatattatataagtgtttagatttttgaaatagatttgttttaatgggttagtttttttagaatgtaagaaaatatatgacgaatgtttttttattaaagttatttttgtgattaattaagtgtgtgtatattggaatgtgttggattttttaatattaaataatgagaaaagatttttttttttttattttttaattttatatgttttgtaattagttttttattattgatatttttttttttaaatattagatatttggtggtttttattaaattagtacgtagtgttttttttgttggttttgtagtatatgaagtaatttttaatgttagttttttagttgtattaagagaaagttaagataattttgtagaaaaaaaaaattttggtttagaataataaattgtttttgttagtaatgatgttagatatttttaattttgaattaggtattttattttatttttttaaatgatggaattttatttgagatgtaagtgtaatatttgttaatgtattttttttgtttttatatatttatataatataaaattttatatttatataatggtatggggtatagatgaaataagattttattttattgtttaatatatttttttggtatggagggagggatttgaatggaaattagtttaataaatttggatttgtattgatttgtaagattttgttttgttttggttatagaaattatgattgtaggcgttagttagatttgataagtatttagtttaaataaaataaagaggaggaaaaattgtgtagttgttattttatttgataaggaagaagttttgggaaatttgatgttattggtttttgttaattgaaaggcgttagtttttttggttttatattttatggaaaagaagtttttatgtgaggttgatttattttttagttaagtagataaatataatttgtattttatttttttgggttgatgatattgtattgtaattgggtttagcgcgtaatgggggtgggggtgcgtgtattgaaaaataatatatggaaataatttatatttgtaaaatattaaaataggattttggggtaaatgaaatttagtatttatttttattattagaataagttaagagttaagaaatttgtatttttaataattgtattattttttttttataattagtgattagtatatagtaggtttaagttgtttatgttaatgttaatttattatttttttttttcgatttttttaagaaaataagtagaagacgaatgtttgtagggttatttggattgtaagtatgaatataggtttttgtttttattttagaggtagaggtacggtattcggggagagtttgggtttgtttgtagttagtcggtttttaatttggggagaagtagtcgttaggtggtatcgttgagtttttttgcgttcgcgaggcgaggtaggaaatcgtggggatagttagttttttttttttttttttttttttttttttcgatttttttattattttttattattgtattttttttagttagaggtttaaacgtttaacgagtaatagggtatgtcgatgaattttgatttttttttataaattaaagtttagggtaattattcgtcgttttttgtttatttgttaggagttt

SEQ ID NO: 161 - DNA, 5986 bp, Artificial Sequence
  chemically treated genomic DNA (Homo sapiens)
  unsure (946)
aggtgtttttattagggtatttagggtgtttcgttttttgggtttataaaagttatagtgtgaagggatgttgttgtttagatttttttgaggttggggttttggtttgggaagtttttaaggttttgggttttgttattttggatggtatttgttttttgaaaattttgtcgttgtttttggttttgaggtgttatagtgtttttggttttgaggttttttagtatttgttagatgtggagttgttttttacgtagggattttgatggggtgtattttagatttgtgtattattgtttttggttttttgagtgcggtatatttggttttaggaaattttgtattatatttttttttgaagagtttgggtttcgttttgtcgtttaggttggagtgtagtggcgagtttatagtttattgtagtttttaatttttgggtttcggcgattttttcgttttggttttttgagtcgttacgtttagtttttatattgtattgttttttcgtggtttaacgttttttcgtgttaggttttggatttggagtttcgtagagtggggaggtttttgttttagggtttatttagtcgtagtttttttttttttttatgggatgttttatcgatttttttgtttggattttatgttttagggattatttggatttattttagtttttgttttagattggggtttttggtgtgggggttttggtattgtcgaggggttttaggagttatttttagttatatagtgtttcggtttattttattaggtttagggtacggtttttatgtttttaaattgcgtttgggattttgtttatttttagtttttggggggcgtttttagattggggtttggttttttaggtttagggttttgttatgtttttttttaggtttattttttatattatggtttattagtaagaagcgttacgagntcgttgttttttttttttcggttcgacgtttacgatcgtatggattgtaagggtttggagcgtgcgtagggataattgttttttacgtggttaatttggttattgttttattgcgtcgtttgtttatcgatcggtgtgtggggtttttttttttagatttagggggttgggtaatatttttttttttttagatttaggagtttaggttttagtttttttttttttaggtttacgggtttaggtttttagtttttttttttttagatttcggggttagggtttttagttttttttttttttagatataagagtttagatttttagtttttttttttttgggaatataggtgttaggtttagttttttttcggtggtgaagtagtggaaagagtcggtttaggtagttgtgggtttaggttttgtttttgttattttgtagtttatggtaggaagggtttttttttgttttgagttttagttttaagagtttattttggtttttagttttgagattcgtggaggtattagtttgtttttagtgttttttggtgacgttgtgcggttcgtttttttatagagattttgagggcgcggtggtttacgtataggacgttatttcggatttgttgtgtaatcgtatcgatattttttagttggttattattaaggagttgattcgcgcggttttcgattatgtcggtaagtaggtttacgtggagttggtcgagaggttttgcgcggggcgggtggtttggttagaaataatttttttttttttgttagttgggtttattttttatattttcgtttttattttcgttatttatttgtttttatttattcgttatttcgtttttacgtaggatgaggaagcgggatttcgggagtgcgtttagtttgggcgatcgcgttttttacgtgattattagtgtcgttaagggtgtggtcgtttatatgaagtcggaggttaggtttatttggttgtttgttttcgtttagttttttcgtttttatttttgtttttcgagatgggcgggtttgcgggaagggtggggttttcgcgtgtttgtgggttttgtagaatcgttttttatggtagtttgggtgtggtttcggtttttttggaggttttttttttattttgattttttttttgtttttttatggaaggattcgagtttttattttgtgtatataagttttttagttcgggtgtttttttggatttataattttgtagttttattattatttttagtatttatattttagttttatgatttttgattttttgattttttttttatttttgtttttttttgtgaattttgattttttcgtggtgatttgagagttttatagattttgtggtttagagatttcgtgattttcgattttattttagatttaggttttttttatgttatagttcgtaggtaggtttagttttaagtttaggttttatgattatttcgtgtttatttcggtgttttttttttggttgttcgggtgtgattgttatgtggcgtagattcgttgttcgtgttggagtaagtttgtttattgatacgtagtattatttggagtagtagttggttaagtttttttgcgtattttcgagtttattttggaggcggtcgtgcgaggttgtgttattgcgtacgggggtataggggattgggggtatttgcggggggtagcggcgagattatcggttattatttgtttttttttttgtaggggggatatacgcgttgaagacggtgtttacgggtaaggtgggcggttttttgcgttgcgttaaacgtcgtaattgttgtattggttgtcgtatagtgtttagttattagggtgagcggttttggtatttgggtttttattggtttttaatttgttttgtcgttattttagattttagatatttattttatcggttggtattgtatcgagtgtttagagtttttgggcggtggtttttgtttttattttttatagagggttttcggtttttatttcgggagttttttaggggagtttttttagtatatttgtttcgttgttttttagtttttggggatttttagaagttgggattggtagtgggtagggatggggtggtttagtttttggttggttttagtatttgggttgattcgtttttttataggagtcgtgtgtgagttttgttagtttcgggagtttgagttgtattagaaggaggtgagagggtcgggagttgaggaggggttaggtggggaggcgggggcgtttgtttagtcgttgtcgtttttaggtattttatttgaatgttttggaggagcgtttttcgcgttttggacgtagtgttagcgttgttagggtagttgtacgaggacgttatttgtattaggtgtgtgtcgtgtttcgattttgggttgttttgtttttttttagtttttaggtttgtgggttgtggatttaatttttgattttaaggttttttttgagtatttttttcgtttatttttttttagttgtgagttgttttgagttttagtgtttttgtttgaaaaatgggtttattttagttttttagaggtgcggtgtttagggaggtagcgtcggtatttagtgttgttcgggaaacggttgttttttcgatatatttagttagtttggttttttttttagggcggggcgggttattttttagggaacgggtaggcggggtgggtttttacgtaggtgataggtgatatacggttagttatgcgttgtatttcgttaggtattcgttgttatcggtttcgttttttttttgtttgttgagtaaatagttcgttgcgggagggggcgggtgggttgggtagtaggcggggattaatagttttcgggaatagtttttattttttttttaggatggttattgggttttggttggttttgattttgtttttgtttttggttttattcgtagtcgggattgttttattttttatatgcgtaagaaggtgcggaaggatttggaagattaggagtagtttttggcgtttcggattttttggatttgaggtttggtgattttgtaagtattttatggggcgggggcgggattagggagaattaataaagttttggatttttgttatatggtgttttgtggtttttgggggatattgtttggttttataagttttggttttggttgggatttttttgaggttcgtatcgttttttatttttagtaaaagttttcggatttttatttgtgttgtttggtttatgtgggttaagtttgttttagttttttttttggttttgaaggaatttttatattagcgtttttttgttttgtttagggttttaggtgtttggtttcggttagttttttttggtgatgattttggggattttggtggttgtttcgttttttaggtgttgatttgttttttttaggttttggcgagttttagcgtatcggcgttttattttttagttcggttaagggatttttttatttttcgtcggattatatatttacgatgtttttacgtcggggttttggtaatgggttttgggtttgggtttttttttagcgatttttatttttattttcgtagtttttaattgtcgttagatgttttcggttttttcgttattttatatatttttcggggagagttttgtgtttgtttttcggtttttagttcgtttttgttggaattcggtttttgggtttagatttttcgttttttgatttttttttttagtgaattttagttttttttcgatgtttttagggttttttaaatttagtttttgttttatttttagtttttaaggttagttttttaaatttagttttacgggatttttaaatttagatatttttgttcgttatttttgttatgtgataaaggggttgtgtaatttagtttttttttttgattttttttgaggggatttttgaggagggtcgagtttgtggttagcgggtatttttttttttcggtagggttgggttaagatataaatagggttggcggttcgttagcggtaaatagttcgttcggtattattatgttcgttttggaggttgtatagtaagtgaggtttttaaatttgtattcgggtttttatttgtattcgtttttgtggggttttatttatgggtagtggtttttttgttttttacggtcggtgggtgggagtggaggggaggggtttgttttgttttttgttttttttggttttgttttttttttatttcggattttttatttttttagtttttattttttttggtttttaaagattttatttttttagaatatttgttagcgtgtttttttgcgggcgtttttcgtggtttttattttgtttatttttttgttttttcgagttttcgtatttgttcgttttgtatttggtattttttagtttttaatattttgtttgttgttttttgtttttttgtttgtttttgtgtttttgtttttagttttcgttttttttgttttttggtttttttttgttttatttttatttttagtgtttttatttggggttttaggaatttttttcgtttttgtgcgtgaatgtttttttgtatatttttttttgtgttttatttttttttgagtttttttatttgagtttttttcgggtttttttttttttatttagatatttttttattttttttttttggtttaagttggatttaattgattcgttattaaggtcgtatttgatttaggttttttttttatttttatatttttttttcgggatttttttttttttattttttttgtttttttttattagggtgtttatgtaaattttggggaggagggggatatttgttttttttttattttttattttttgttttagtagggggtagtgggggagttcggtgaatgtggtggggttggttttttatatagggttgcggtggttatagttgttgtcgtttttttattagtttttaattattttgagatttaggtggttggaggtagttttagtatgtttttgtgtttttttttttttagg

SEQ ID NO: 162 - DNA, 5986 bp, Artificial Sequence
  chemically treated genomic DNA (Homo sapiens)
  unsure (5041)
tttggagggggagagatataggggtatgttgaggttgtttttagttatttgaattttaaagtggttgggggttgatggggaggcggtagtagttgtgattatcgtagttttgtgtgagggattagttttattatatttatcggatttttttattattttttgttgggataggaagtggggggtgggggggaggtaaatgttttttttttttttagaatttgtatagatattttggtggggaggggtagggaaagtgagggagagaaagtttcggaaaggaggtgtggggatggagagggggtttgggttaagtgcggttttggtggcgagttagttgagtttagtttggattagaggagaaggatggagagatgtttgggtagagagggggaagttcggagaagatttagatgaggaggtttaaggagaggtgggatatagagaaaggtgtgtaaagggatatttacgtatagaggcggggaggatttttggagttttagatggaggtattgagagtgagggtgaggtagaaggagattaaaaggtagggagagcgagaattggagatagagatatagagataggtagagagatagagagtaataggtagaatgttgagagttgggagatgttagatatagagcgaatagatacgggaattcggggagataggaggatggatagagtgagagttacggaggacgttcgtaggagggtacgttagtaagtgttttggggaaatgagatttttggggattaggaaagataggaattggggggatggagagttcgaagtgaagagggaatagaattagaaggggtaagagatagggtagattttttttttttatttttatttatcggtcgtgaggagtagagaaattattgtttatgggtgaggttttatagaggcgagtgtaggtggggattcgggtgtaggtttgggggttttatttattgtgtagtttttagggcgagtatggtggtgtcgggcgggttgtttgtcgttggcgagtcgttaattttatttatattttggtttagttttgtcgggggaggagggtgttcgttggttataagttcggttttttttaaaaatttttttaggaggggttaggggagggggttggattgtataatttttttgttatatggtagggatggcgggtaggggtgtttggatttggggatttcgtggggttgggtttggggggttgattttgagggttggagatgggataggagttggatttggggaattttgaaaatatcgaggaagggttggggtttattgaagaggagaattaggaaacggaggatttggatttaggagtcgaattttagtaggggcgggttgggggtcgaggggtaagtataagatttttttcgggggatgtgtgaggtgacgggagggtcgagggtatttgacggtagttagaggttgcggggatagagatgggagtcgttggggggaaatttagatttaaagtttattgttaggatttcgacgtggaaatatcgtgggtgtgtggttcggcgggggatgggggggttttttggtcgggttgaggagtggaacgtcggtgcgttggggttcgttagggtttggaggaaataggttagtatttggagggcggggtagttattagggtttttagggttattattagggagggttggtcggggttagatatttggggttttaagtagggtagagaagcgttggtataagggtttttttagggttagagaggaaattgaggtaggtttggtttatatgaattaggtagtataggtgggagttcgggggtttttgttgaggatgaggggcggtgcgggttttaggagggttttagttaaggttagggtttatgaaattagatagtgttttttagagattataaagtattatgtagtaaaagtttagaattttattaattttttttggtttcgttttcgttttatgggatgtttgtaaggttattaggttttaggtttagggggttcgaagcgttaggagttgtttttggttttttaggttttttcgtatttttttgcgtatgtagaagatggggtagtttcggttgcgaatggggttaggggtaggggtagggttaggattagttaaggtttagtggttattttgggagaggggtgggggttgttttcgaggattattggttttcgtttgttgtttagtttattcgttttttttcgtagcgggttgtttgtttagtaggtagggggggggcggagtcgataatagcgggtgtttggcgaggtgtagcgtatggttggtcgtatattatttgttatttgcgtgggaatttatttcgtttattcgttttttggggaatagttcgtttcgttttggggagggggttaggttggttgggtgtgtcgggaggatagtcgtttttcgggtaatattgggtgtcggcgttgtttttttaagtatcgtatttttggggggttgggatgggtttattttttagataaggatattgaggtttaggatagtttatagttggaaggggatgggcggggaggatgtttaggagaggttttggagttagaggttgggtttataatttataggtttgggagttgggaaggggtagggtagtttagggtcgggatacggtatatatttggtgtagatgacgttttcgtgtagttgttttggtagcgttggtattgcgtttagagcgcgagaagcgtttttttagggtatttagatgggatatttggggacggtagcggttaagtaggcgttttcgtttttttatttggtttttttttaattttcggtttttttatttttttttgatatagtttagattttcggggttggtagaatttatatacggtttttgtggggaggcgggttagtttaagtgttggggttagttaggaattgggttattttatttttgtttattgttaattttagtttttgaaagtttttagaggttggagaataacggagtaagtgtgttgggaaaatttttttggggaattttcggggtgggggtcgaggattttttgtggggggtggagataggggttatcgtttaggggttttgggtattcggtgtagtgttagtcgatggggtgggtgtttaggatttggggtgacggtagagtaggttgagggttagtgggggtttagatgttagggtcgtttattttggtggttgagtattgtgcggtagttaatgtagtagttgcggcgtttggcgtaacgtaggaggtcgtttattttgttcgtgagtatcgtttttagcgcgtgtgttttttttgtaggagaggaggtaggtggtggtcggtgatttcgtcgttgtttttcgtaggtgtttttagttttttgtgttttcgtacgtagtagtatagtttcgtacggtcgtttttaggatgggttcgaagatgcgtaggagggtttggttagttgttgttttaggtagtattgcgtgttaatgggtaggtttgttttagtacgaatagcgggtttgcgttatatggtagttatattcgggtagttagggaaagggtatcggggtggatacggggtggttatggggtttgggtttagggttaggtttgtttgcgggttgtgatatggggggggtttgggtttgggatggggtcggaggttacggagtttttgggttatagagtttgtagggtttttaggttattacggaagggttagagtttataaggggaagtaaggatgaggaaggggttaggaggttagaggttatggggttaagatgtgggtattgggggtggtggtagagttgtaggattatgaatttaagggaatattcgagttgggaggtttgtatgtatagggtagagattcggatttttttatagggaagtaagggaggggttagaatagaggggggatttttagaggggtcgaggttatatttaggttgttatggggggcggttttgtagggtttataggtacgcggaggttttatttttttcgtaggttcgtttatttcggaaagtagaagtgagagcgagggggttgggcgggagtaggtagttaggtgggtttgattttcgattttatgtaggcggttatatttttggcggtattgatgattacgtaggggacgcggtcgtttaggttgggcgtattttcggggtttcgtttttttattttgcgtggagacggggtggcgggtgggtgagggtaggtgggtggcgggggtgggggcgagggtgtaggaagtgggtttagttggtaggaaggagggggttatttttggttaggttattcgtttcgcgtaggatttttcggttagttttacgtgggtttgtttgtcggtatagtcggaggtcgcgcgggttagttttttggtgatgattagttgggagatatcgatgcggttgtatagtaggttcgagatgacgttttgtgcgtgagttatcgcgtttttagggtttttgtaggagagcgggtcgtatagcgttattaaaaggtattgagggtaggttggtgtttttacgggttttagggttggagattaggatgagtttttagggttgaggtttagggtagagaggggttttttttattataggttgtagagtggtagaggtagggtttgaatttatagttgtttaagtcgattttttttattgttttattatcgaggaagagttgggtttgatatttgtgtttttagaggaggaggggttgggggtttggatttttgtatttaagagaggaaggggttgggggttttgatttcgggatttgaggaggagggggttgggggtttggattcgtgggtttgagggaggaggggttggggtttagatttttgggtttgagggaggaggggtattgtttagttttttgagtttgagggaggaggttttatatatcggtcgatgagtaggcggcgtagtgaggtagtgattaggttggttacgtagggggtagttgtttttgcgtacgttttaggtttttgtagtttatgcggtcgtgggcgtcgggtcgggaggagaagagtaacggnttcgtagcgttttttgttgataagttatggtatgggaagtagatttgggagggagtatggtaagattttgagtttgaggagttaagttttaatttggagacgttttttagaaattgaaggtagatagggttttagacgtagtttgaggatatgggagtcgtgttttgagtttggtgggatggatcgagatattgtatggttggaagtggtttttgaggtttttcggtaatgttagagtttttatattagagattttaatttgaaatagagattgggataaatttagatagtttttaaaatatgagatttagataggggagtcgatgaagtattttatgaaagagaggagaaattacggttgggtgagttttgaggtagagatttttttattttgcgaggttttaagtttaaggtttggtacgagagagcgttaagttacggggaaatagtatagtgtgagaattgggcgtggcggtttaggaggttaaggcgggaggatcgtcggagtttaggagttggaggttgtagtgagttgtgaattcgttattgtattttagtttgggcgatagagcgagatttagattttttaaaagaaaatatggtgtaaggttttttgggattaagtgtgtcgtatttagagggttaggggtaatggtgtatagatttaaggtgtattttattagggtttttgcgtggagggtagttttatatttgataggtattgggaaattttaaaattagggatattgtgatattttaaaattagggatagcgatagggtttttaaagaatagatgttatttagggtaataaagtttaaggttttggaggttttttaaattaaggttttagttttaggagaatttaagtagtaatatttttttatattgtggtttttgtgaatttaaagaacgggatattttgagtattttgatgagggtattt

SEQ ID NO: 163 - DNA, 6874 bp, Artificial Sequence
  chemically treated genomic DNA (Homo sapiens)
gtttattgtaatttttattttttgagtttaagcgatttttttgttttagattttttagaagttgggattataggtgttcgttattatatttagttaattttttttgtatttttagtagagatagggttttattatattggttagtgtggttttaaatttttgattttaagcgatttattcgttttaattttttaaagtgttgggattataggtatgagttatcgtattcggtttatttttgtttaattttaaaagaaaaatataaaagttatattgattgttaaagaagttatatggtataaatttatataaagtaaaaaaatatattttttttattttaaattttattttttataggtaagtattattagtgtttggagtgtggttttttagattttttttgggtataatgatttataaatttttttttattattgttaatgttgttattataattgatattttttttgtttttgtgtaaaattatgaatttttgagtaaaggttaattttaaatgaaaatagatttagggtattttgatagtaattttttttttttttttgagatagggttttttttttatttagattgagtgtagtggtgttattatggtttattgtagtttgggtttaagtaatttttttattttagtttttttagtagttgggattacgattatagatgcgtgttattgtgttttagtatttttttttttttttgagatgaagttttatttttttatttaggttggaatgaagtggtacgattttggtttattgtaattttttttttttagatttaagtgatttttttgttttagttttttgagtagttgggattataggtatatattattaggttcggttaatttttgtatttttaggagaggtgggatttttgttatgttggttaggttggttttgaatttttgattttaggtgatttatttttttaggttttttaaagtgttaggattataggtatgatttattttgtttgtttgtgttttttttttttaagagatggggttttattgtgttgtttaggttggtgttaaaattttcggatttaaattatttttttattttgattttaaaaagtgttgggattttaggtgtgaattattgtatttagttatgatagtaatttttaaaagtaatttttaatttttgtttgttattagttaggtgataaaaattagaagaaagaaagaaaggttagggtggaatttgtgtggtgtgagggatttggttgaaatttttatgtatttatagaggttttttatggtttggggtggatatgagtttttatttgttgtaaggtgttattttgattaggttttttcggaggaatattttaattttatattttagagtagttaggtaggagtttatttaggtttagtaggttgcgtggagtttatggtaaagtggagagttttttttatggttattattagttttaggttataatgtttttgtgggtatttaggtttagtgttattaaaaattttgatttttttgagagaggttagatatttagatttttttttttttttgaaaaggagttttatttcgtagtttaggtcggagtatagtggttttatttaggtttattgtaatttttgttttttaggtttaagtgatttttttgttttagtttttcgtgtagttgggattatagatgtgtgttattatgttcggttatttttttatttttttagtagagatggcgttttattatgttggttaggttggttttgaatttttgattttaagtgatttatttattttagttttttaaagtgttgggattatagatatgagttattacgttcggttagatatttagatttttatgtaaatttttatgatttttaaatgttataaggtttaaataaaatatttttatgagatagtttttgattttgattttatttttagtaatatttttggttttggaatttgtagtaatttaatagtgtgggtagaggtttttttttgattttttgtggtgataaaggatatgaagatgggttattttaagtagatagagaagttgtgatattaatattggtgtgtaatgatttaggagttgggagaagttgaagagagggtagtttatttgaagggaagttaaggattgcgttttttttagatatttttttttatagatgtgatagagagtagttgtttttgttgagggatgttatttttgtatgtgtttaaattagggggcgtaaatgaaagggtttttagagggtaggtgggaatgaaattttagagttttggttgtaatattatggtgtttagataaaatatgattttaggtattatttgtggtttttaaaatttttttggaatttatttatttgtttgatttgtttttttttttgggttaatacgttttatatgtttaagtatttgttgtaaagagtaaattagtggagggaggggagatttttttaaaattattgggggttgggtgtagtggtttaggtttttaattttagtattttgggaggtcgaggtgagagaatcgtttgagtttagaagtttgagattagtttgggtaatatagggagattttatttttatatgataaaaaatatatattatattttatttattatatatataaaatatatattatattttattgattatttgtatatattttattttagtattttttaagtttttggattgtgatttatagtaagaaatgtagttaatattgttatttattatatatatatattgaattatgagaaattgataatattttatttttttgatttataaaatggtaattttgtagggtttaatttatatataatgtaaataaatattttatgtaataatatttgtttttgttttttgtgatatttattaatttatttttttaaatgttgattgtagtatattgaattgatattattattattattagtaatgattaggttataattaattgttttatttaatttttataatttttcgggtaggaataattattgttttttatttttttaaatatgttaagatgttttatttttaggatgaggtgatttattttaggtaatttttattgtttaattattgattaattattttgttttttagtttttatgttattaaatttgtattaagaattttatggaataggttcggtatggtggtttatgtttgtaattttagtattttgggagatcgaggtgggaggattatttgaggttagtagttcgagattagtttggataatatggcgaaattttatttttattaaaaatataaaataattagttaggtgtggtggtgggtatttgtaattttagttatttgggaagttgaggtagtaggagaatcgtttgaattggggaggtagaggttgtagtgagtcgagatcgtgttagtgtattttagtttgggcgatagagcgagattttgttttaaaaaaaaaaaaaaaaaaaatttagggaatggatagtagtattgatgaatattgcgtttggagagattagattatttgttatttgtttttaggtatagggtttattaagaggtagattttagatttaaataattttgtaatagtaaagtttaagttatttttattgttttggagaaaagatttagatttagagtttgaattttattttgtagtattttagttttaattttttaagtttttttttttttttttttttttttttgttgggtacggtggtttatgtttataattttagtattttgggaagtcgagggggaaggatcgtttgaggttaggagttcgaaattagtttgggtaatatggtaaaattttatttttataaaaaatataaaaattaggttagagtggtggcgcgtatttgtagttttagttacgtgagaggcggaggtgggagaatcgtttgaattcgggaggtagaggttgtaatgagtttagatttcgttattgtattttaggttgggcgatagagcgatattttgtgtgaaatttttttttttttttttaacgggttttttagagaagtgtgtgtatgtgcgtgtgtgtgcgcgagcgtgtttgtttgggtttaaattttttgtcgggttatatttttttaagtttttgtattggttgtagggtgggttttattttcgggacgtttttttttttaagtttagtttgtagttggaagtttttattgatttttattttttttttttgattttcgttttttttttttgttcgttttaggattgggaggtcgatttttttttttcgtttttttttttattagttttttttagatgtatgtttgttaaagattttttagtgtagaggatgatgaatgaagattttcgagttagttcggtgggaaagtttcgtcgtttataaaagcgagggaaagggaagggaagttgggggtaggggaaaagttagagttgagaggttggggcgcgacgagtttggatatcgggcggggatttaagtttttttcgtttagttaataattgtgttttttttaggaaggcgtgaggaaatgttttaattaatttttgtattttttttttggaatttgggttgtatttttttatttattgtaaattttataatttatttaggggtttttttagtgtttgtttttagcggtttcggtgtttatttattagtgttgttttttttttttcgtaagattgcgttttagttttagttttttttttcgcgggtgttttttaaatcgttttattattttcgggtttagggaggcggaatcgtgtttgtttttcggtttttttaagaggcgtcggttttattttttttagagtcgcggtttgacgcgagatgatagtaacgagttcggtatgtttatgtaaataagcgtttttttgtgggttaatggggagcggaggtgtcggaattacggattaatggggcgggggcgttggggtttattatataaggagcggtttcgttataaaaggaaatattgtatttttttatatggggggaagggtcgggggattttttcgtcgttagcgcgtggtttcggttttttttattcgtcgtttcggtcgcggttagtagtttttgtttttcgggggacgttgacggtcgttcggcgcgtcgttttagtagacggatagggggcgttgcgcgcggtttggggtaattcgggttataggggtaggaaagtgagggtttaggtcggttcgggcgtgtaggggtttcgggttcgtagcggcggtcgcggtagcgatagcggtattagtagtagcgggagtgtcgggttgagtcgggaagtcgatggcggcggttgcggcggtttcgatttttcgttgattgttcgttcgtttttttgtatcgagcgttatgttatcgatttaagttggggtcgcggcggttttgggtcggggttcggttttggggggtagtttgaatcggatttcgacggggcggtcgggcggcggcggcgggatacgcggggttaacgggggtcgggttttcgggaatggcgcggggttcgggttcggtcgtttggagcgggaggttgcggtagcggcggtaattatttcggcgtttatcgcgggggttttttatagcggtagcgagggcgattcggagtcgggcgaggaggaggagttgggcgtcgagcggcgcggtttgaagcggagtttgagcgagatggagatcggtatggtggtcggtgggttcgaggcgtcggtagcggttatcgggggttacgggtcggtgagcggcgcggtgagcggggttaagtcgggtaagaagattcggggtcgcgtgaagattaagatggagtttatcgataataagttgcggcgttatacgatttttagtaagaggaagacgggtattatgaagaaggtattaagtcggggggttggtcggtttcggggttcggttggggtggggatgtgtaaagggagttcgggaggatcgtagagtcgaggcggaggtgagaggttgcgagttcgtaggaggtgtgtgggaggggatggtttttgttcggggagggtcgaaggggaggggtcgtcggggaaatgtggggagaggggagatttcgcgaacgttcgtaatcgtggggaaaggcgtagaggtgggagtgatcggcgttagagaggaagagggtttttgttgagtgaaggggtgaggagcggtgatgggaggttacgaggttgtcggggaggtggataatgagaattcgggattagtaggtttagtgtatttcggtgttcggacgagggcgtcggaaaagtagggagtaaacgagaaggtatggaggtgaggaggttggagttgtatgataataatgagcgaatatgtgtgggaggaagtgggtattacgagagtagtgttggttggaaggataggtagggttagggattaggtaagggagcggggtaggagaattggtgttgttttgagtagtaggaatttagttttgcgtcggtcgtgagttttttatggtatttattgggaattatatgtttttggtaggattcgttgtagaattttttgtcgttaggataagtggggtttttagttttagggagaatttatgtttggatggggtttgggggaagttagggaggtttgtagaggtatttaggaattttttttttgttagttagtgaaaagtgttgaggaaaggagttattttggggtgtagacgataagggaagagatgaaagtagaggaattgggagataaggagttggatttttgggaatattggttggtgtttatttttgttttatgtagaaattagagttgtttttaaggtggtttgtagaattttgttgggagagtatggtatttatggggttatttttgaaggttttttttttgggtttatggtaggatgttt

SEQ ID NO: 164 - DNA, 6874 bp, Artificial Sequence
  chemically treated genomic DNA (Homo sapiens)
aaatattttgttatgagtttaggaaggggatttttaaggatggttttatagatgttatatttttttaataaagttttgtaaattattttggaagtagttttggtttttatatgggatagaaataaatattagttagtgtttttaaggatttagttttttgttttttagtttttttgtttttatttttttttttatcgtttatattttaaaatgatttttttttttaatattttttattggttggtagaagaggaatttttaggtatttttgtaagtttttttgattttttttaaattttatttaagtatagattttttttagggttggaaattttatttgttttaacggtaggagattttgtagcgggttttgttaggagtatgtggtttttagtggatgttatggaagatttacggtcggcgtaggattaggtttttgttgtttagggtagtattagtttttttgtttcgtttttttatttggtttttaattttgtttgtttttttaattagtattattttcgtggtgtttatttttttttatatatgttcgtttattgttgttatgtagttttagtttttttatttttatattttttcgtttgttttttgttttttcggcgttttcgttcgaatatcggagtgtattggatttattgatttcgggtttttattatttattttttcggtagtttcgtagttttttattatcgttttttatttttttatttagtaagggttttttttttttttggcgtcggttatttttatttttgcgtttttttttacggttgcgagcgttcgcgggattttttttttttttatattttttcggcggtttttttttttcggtttttttcgggtaggagttatttttttttatatattttttgcggattcgtagttttttattttcgtttcggttttgcggttttttcgggttttttttgtatatttttattttaatcgggtttcggggtcggttagtttttcggtttggtattttttttatgatgttcgttttttttttgttgaaggtcgtgtagcgtcgtagtttgttgtcgatgaattttattttgatttttacgcggtttcgggtttttttattcggtttggtttcgtttatcgcgtcgtttatcggttcgtagttttcggtggtcgttgtcgacgtttcgggtttatcgattattatatcgatttttatttcgtttaggtttcgttttaggtcgcgtcgttcggcgtttagtttttttttttcgttcgatttcgagtcgttttcgttgtcgttgtagagggttttcgcggtgggcgtcggggtggttgtcgtcgttgtcgtagtttttcgttttaggcggtcgggttcgagtttcgcgttattttcggggattcggttttcgttagtttcgcgtgtttcgtcgtcgtcgttcggtcgtttcgtcggggttcggtttaggttgttttttagggtcgagtttcggtttagagtcgtcgcggttttagtttgggtcggtaatatggcgttcgatgtaggagggcggacgggtagttagcgaggaatcggagtcgtcgtagtcgtcgttatcggtttttcggtttaattcggtattttcgttgttgttagtgtcgttatcgttgtcgcggtcgtcgttgcgaattcggggtttttgtacgttcgggtcgatttgggtttttatttttttgtttttgtggttcgggttgttttaggtcgcgcgtagcgttttttgttcgtttgttagggcggcgcgtcgggcggtcgttagcgtttttcggggggtaggggttgttggtcgcggtcgagacggcgggtggagggggtcgggattacgcgttggcggcggagggatttttcgatttttttttttatataaagagatataatgtttttttttatggcgaggtcgttttttatatggtgagttttagcgttttcgttttattggttcgtggtttcggtattttcgttttttattggtttataagagggcgtttatttgtatagatatatcgaattcgttgttgttatttcgcgttagatcgcgattttgagaggggtggagtcgacgttttttaaaggaatcggagagtaggtacgatttcgtttttttgaattcgagaatgatagaacggtttgggaggtattcgcggagaaggaggttgggattggagcgtagttttgcggaagagagggagtagtattagtaaatgggtatcgggatcgttggaggtaaatattggggaaatttttgggtggattgtggggtttgtagtaaataaaaaaatatagtttaaattttaagggaggagtgtagggattgattggagtatttttttacgtttttttaagggaggtatagttattggttgagcggagagagtttgggttttcgttcggtgtttagattcgtcgcgttttagttttttagttttaattttttttttatttttaattttttttttttttttttcgtttttgtaggcgacgaaatttttttatcgggttggttcgaggatttttatttattattttttgtattggggggtttttggtagatatatatttggaaaaggttggtggaggggagggcgagagagagagatcggttttttagttttgaggcgggtagggaggagagacggagattagggaggagagatggagattagtgaagatttttagttgtaggttggatttggggaggaggacgtttcgaggataaagtttattttatagttagtgtaaagatttgggaaagtgtggttcgatagaaagtttaagtttaagtaagtacgttcgcgtatatatacgtatatatatatatttttttggaaagttcgttggagaaaaaaaaaaaagttttatatagggtatcgttttgtcgtttaatttggagtgtagtggcgggatttgagtttattgtaatttttgtttttcgggtttaagcgatttttttattttcgttttttacgtagttggaattataggtgcgcgttattattttggtttaatttttgtattttttgtagagatggggttttgttatgttgtttagattggtttcgaatttttggttttaagcgatttttttttttcggttttttaaagtgttgggattataggtatgaattatcgtgtttagtagaaaaaaaaaaaaaaaaaaaaaaaaatttaaaagattagaattggggtgttgtaaagtgaggtttaagttttgggtttgggttttttttttaaagtagtgaaaatagtttggattttgttgttatagaattatttaaatttggaatttgttttttggtaagttttgtgtttggaaataagtgataagtgatttgatttttttagacgtaatatttattaatgttgttatttattttttgagttttttttttttttttttttgagatagagtttcgttttgtcgtttaggttggagtgtattggtacgatttcgatttattgtaatttttgtttttttagtttaagcgatttttttgttgttttagttttttaaatagttgggattataggtgtttattattatatttggttagttattttgtgtttttagtagagatggggtttcgttatgttgtttaggttggtttcgaattgttgattttaagtgatttttttatttcggttttttaaggtgttgggattataggtatgagttattatgtcgggtttattttatgaaatttttaatgtagatttaatgatataaagattaaagggtagagtaattggttagtggttaggtaataggagttatttggagtaagttattttattttagggataaagtattttggtatgtttaaggggatgggaggtagtgattatttttgttcgaaaaattatggagattaaataaagtagttgattgtaatttagttattattggtagtggtagtgatattaatttagtatattataattaatatttaaaagaataaattaatgggtattataaaaagtaagggtaaatattgttgtataaaatgtttgtttgtattatatataggttgaattttataaaattgttattttataggttaagaaggtgggatattgttaattttttataatttagtgtatgtgtgtaatggatgataatattaattgtattttttattgtgagttataatttaaaagtttgaaaaatattgaaataaaatatgtgtaagtgattagtaaaatatagtgtgtattttgtgtgtatagtgaataaaatatagtgtgtattttttgttatatagagataaggtttttttatgttgtttaggttggttttaaatttttgggtttaagcgatttttttatttcggttttttaaagtgttgggattaaaggtttgagttattgtatttagtttttaatagttttaaagaggttttttttttttttattaatttattttttataataggtatttaaatatatggaacgtgttagtttaagaggaagaataggttaaatagataaataggttttagaagggttttagggattataaatgatgtttggggttatgttttgtttgagtattataatattatagttaaagttttgggattttatttttatttgttttttaaagatttttttatttgcgttttttagtttagatatatgtaggggtgatattttttagtagggataattgttttttgttatatttataggggagggtgtttgggaagaacgtagtttttagtttttttttaaataggttgttttttttttaattttttttaatttttgggttattgtatattagtgttagtgttatagtttttttgtttgtttgggatggtttatttttatgttttttgttattatagggagttaggaggagatttttatttatattattggattattgtaggttttagagttaaaagtattgttagggataaagttaaaattaaaaattgttttatagaggtgttttatttggattttataatatttaaaaattataagagtttatataaaaatttgaatgtttggtcgggcgtggtggtttatgtttgtaattttagtattttgggaagttaaggtggatggattatttgaggttaggagtttaagattagtttggttaatatggtgaaacgttatttttattaaaaaaataaaaaagtagtcgggtatagtggtatatatttgtaattttagttatacgagaggttgaggtaggagaattatttgaatttgggaggtagaggttgtagtgagtttaaatggggttattgtatttcggtttgagttacggagtgagatttttttttaaaaaaaaaaaaaaatttgaatatttgattttttttaaaaaaattagaatttttggtaatattgggtttaggtatttataaaagtattataatttggagttgatggtggttatagaagaggttttttattttattatagattttacgtagtttattgagtttaggtaagtttttgtttggttgttttgaaatgtgaagttgaaatgttttttcgaaaaggtttgattagagtagtattttgtaatagatgggagtttatgtttattttagattatgaagggtttttgtaagtgtatgggaattttagttagattttttatattatatagattttattttgattttttttttttttttttgatttttattatttaattaataataaataaaaattaaggattgtttttaaaaattattgttatggttgggtgtagtgatttatatttaaaattttagtattttttgaggttaaggtgggaggataatttgagttcgggagttttgatattagtttggataatataatgagattttattttttaaaaaaaaaaaatataggtaggtaaggtgggttatgtttgtaattttagtattttgggaggtttaggagggtggattatttgaggttaggagtttaagattagtttggttaatatggtaaaaattttattttttttaaaaatataaaaattagtcgggtttggtggtgtatgtttataattttagttatttaggaggttgaggtaggagaattatttgaatttggaggggagagattgtagtgagttaagatcgtgttattttattttagtttgggtgaaagagtgaaattttattttaaaaaaaaaaaaaaatgttggggtatagtggtacgtatttgtagtcgtagttttagttattagggaggttgaggtgggaagattgtttgagtttaggttgtagtgagttatgatggtattattgtatttaatttaggtaagaggaaaattttgttttaaaaaagaaaaaaaaattattgttaaaatattttaaatttgtttttatttggaattaatttttatttagggatttataattttgtatagaggtaaagagggtattaattgtgatggtagtattagtagtaatggaaaagaatttatgagttattgtgtttaggaaaagtttggaaagttatattttaaatattaatagtgtttatttatggagagtgaggtttgggatgagaggggtgtgtttttttgttttatataagtttgtattatgtgatttttttgataattaatatgatttttatattttttttttaaaattaagtaaaaataggtcgggtgcggtggtttatgtttgtaattttagtattttgggaggttgaggcggatggatcgtttaaggttaggagtttgagattatattggttaatatggtgaaattttgtttttattgaaaatataaaaaaaattagttgggtgtggtggcgggtatttataattttagtttttggggagtttgaggtaggagaatcgtttgaatttaggaggtggaggttgtagtgagt

SEQ ID NO: 165 - DNA, 5512 bp, Artificial Sequence
  chemically treated genomic DNA (Homo sapiens)
ggttaggttggttttaaatttttgattttaggtgatttatttgttttagttttttaaagtgttaggattataggtttgagttatcgtatcgggtttgtgattgggttttaatagaaattttagtagtgggttttgttatttttttataagtgaggatgtttagatttaagaggtagatttatttatttaagattttatagtagagttagggtttgtattaggattttatgattttaaagtttttgtgtttttttttaggttatattaattttaggaaagatgaggttaattttattaggtggttaagggaggaatgatattttaggtagatggaatgaaaggggttagtgtttggagttgagaggttagcgtaaggggaaaagtttggtcgaagtatttttttgaggtttggagtaaggaagatgtgggtagatttgagatttaagaaacgaagaaataatgagaaatagattttatagaaaggaattttttttagttataataaaggaaagtggtagagtattgggaggtgtcgtggaagatgtttagttttttcgtatataatttttagagggtttgaggttgggtattgggttggttaaggtataaaagattttttgttgggttggaaggaggagaaattagtttagcgggaagagcggtttgatagttattatggatgaggatgagaagttaggtttgatttagggttgtttaggatagtgttaattttatttagttgtttggttttgtgtgtttttttttttttttttaggtttttgggtttggttttgtaatgagggggttgtaaagggtgggttttttttgtttatttgattggttgggaaatgtgaatttggtatagattttgtattttttttttttcgtttagaaagaaatcggtttataagttttttttttagggtaggtaggttgggtagttgggtagaggaagtaggattttttttttatttattttgtttagttttatatttttttttttatgttatttttagaaatagaggatagttattatgttttaggtaggatggttttgtgtttttttggtgattttattgtaaagtgatttttttgaagagtggtggataggggatagcggtaggaacgggttttatttaagtttcggtagttttttttttttttttagatttgtatagaagtttttattttgtgtatataaatatatattttttttaggttttgatttgtttttttggataagaatgggggtggtatttttatagggaggtattagggtttggttttagaggtggggtatattttgagtatgggtttatggttttatttttagaagtttttttcggtgggggttggagtgtaggtaggttgtttaagtagaggtaaggtgggggtgaaataggatgtttaagtgttttagggttttttttttttgtcgtagggtgaaaagatattttttagaaagtttttagtttttttgggaaggttttttatttttattttattttttttttggtttttatgtaataggaattttttttgaagaagggatttggagtataggaaataaaggtatttttgtattatttttttttattttttaaggaaggttaagttaaggtgattttaatttgttttttttagggtaggggtatgggtagatttgatcgttaagggtaaggtagaaaggggatttgggataattttttttttttttttttttttttttttttttttttgtgacggagtttcgtttttgttgtttaggttggagtgtaacggcgtgattttagttaattgtaatttttatttttttggtttaagtgattattttgttttagcgtattgagtagttgggattataggtgtgtattattacgtttagttaatttttggatttttagtagagacggggttttattatattggttaggttgatttcgaatttttgattttaggtgatgtattcgttttagttttttaaagtgttgggattataggcgtgagttattatgttcggttttttgggataatttttttaatttataaatttaaatttatttttatgtaagtgtgtatagagtatattgttttatttaatagagtaggggtgtaggttgggcgagaatggagatgttatgtttcgtatcgtagaaaaatggtgggttagtttagtttagggaggtttttttatttcgtcggtgtgtgttgggtttggggaagtttagaaaggttatattgagattttgtttataaggttcggtaatttggattttggtgttatttgtgtatttattggttagatagttttgggtaggttttttttatggattaattaaagggtgtgattttggttttgattgtttttaaggttattgaaaggattcgttgagttgaagagtataattatgtttgtatataaatgtgttttgatgtagtttaggatacgaatatagtgtgttaattgaagtttaggttgtagattattattatttttaataaaatataggaggtttttttttggagaatatattgttttttttttttttttttttttttttttgagatagagtttgattttgttgtttaggttggagtgtagtggtatgatttcggtttattgtaattttcgttttttgtgtttaagagatttttgtgttttagtttttcgagtagttgggattataggtgcgtgatattacgtttagttaattgttttgtatttttagtagatacgaggttttattatgttggttagattggttttaaatttttggttttaagtgatttttttattttagttttttagagtgttgggattataggcgtgagttattgtatttagtttggggaatatatttttgtaagatttttaaaatttttttttattttttatttaatattgtgatttggatttgggggtgaagagtagttaggggtaaggaggttagtttcggatcgtagtttagttagatttttgatagtttttgatttttttgaatttttatttcgtggttttagtttttttttttatagtttggttttttaaaattattagggtattttgtggtgggaaattatttatataaggggataaataaggggattgaaagtaaaaagaaattttaaatttgatatttttgggtagttgtgttatttggagttacgattatagttatttttttttaatttaattttgatatttttttttttatttttttgggtgttttttgtttattttgggaaagttttatagtttttttttttttttattgtattttaaagggagaataggtttgaagaaatggagagaaatttagatagaattagagaattagatggagatttaaggagataagggagagatatagagagaataaaagttagagtgggggtcgggtatggtagttgatgtttgtaattttagtattttgggaggtcgaggcgggtggattatttgaggtcgggagttcgagattagtttgattaatatggagaaatatcgtttttattaaaaatataaaattagaaatataaaattagttaggagtggtggtatatgtttgtaattttagttattcgggaggttgaggtaggagaatcgtttgaattttggaggtggaggttgttgtgagttaagatcgcgttattgtattttagtttgggtaacgagagcgaaattttattttaaaaaaaaaaaaaaaaaaaaaatttagaaggggaaatgtgtaatgaaagatatagatattcggggttttatagttagagattaaatgagggatggttaattaagggtatagttattgggtatagggttagggtgggaggtacgggagggttttgaaaatatagttatatatttttttaggtttattttttttattttgtattttggtattttaatgttagttttttaggatttaggattatttatattaaagttaagttcggtttaattaagatagatgtttggtgggtggggttgtttgttggagtaataggtttttgtaggttttggaggagaagtttagagaggtggttgtttggaagagagtaggtaggatttttttttttaagtaggtatttttattttattaggtgtttagatgttagtgtatggtaagggtggttttttgttttttagatttgggtgagaggatttgaaaatttgaggaatttgtttttattaattgatttttatatttgtttgaagggaattgttggagggtataggtgttaagtgggatttatttaaatgtggtaatgggtttgtatttagttatcgataggttgtatgacggtggtaaagttattttttttttttggtttttgtttttttatttgtaaaattatttttatggttatttttagttgtggtatttggtttttattttagttgattttttagttttgtgtttgatttttttttgttaaatttattgtttagagtgggaaaggagaggagagggattatatttttttttttttggggttttttgtagagtatttgggaagtaaggtttttttatattttttatgtatttttttagagtttttaattttttttttcgtgattttgttaattaagatattgtgattatatagagaaggtggggagaacgtagatattttggtttttgtagttttgaagtttttttttttttttttttttgaagttaaaagaatgaaattgggagaggtagtaaggggtaagaaaggagagtggaaatggagagaaaagggtagttttgagaagtagttggggagggaggtagatgagaatgtattttttttaatagaatatgtagttttggtttagttgtgttgtgagtgggtagttgggttggttttttttttggtgttgttaattcgttgttaggtagaggggaggtttagaggagagggaagttgggtaaaggggatggaaggcgtttagttcgattttattaaattttttgggtttcgtgggaaggggttttttggagagggggattgaggttttagataggatatttattgttgtggtaaggtttgtagagagtttcgaagttaggaggatttaagacggtttttttttggatttttttgaaggtagaattagttttataagtaattaggttgggtgaacgggggcgttggttagtttatggattatagtcggttggtgaggttacgtgtttattgtgtggttttgggtggtttcgggtaagttttttttttttttaggatttttattttttatttgtaaaattgtggagagggggagggttgaaatatatgattgttaagattttttttagttttttcgttagggttgagtttagatggtcggagtaaaagaaggagggaggtgttgcggtggtgggggtgattttggttttattagaatttttagttttttttttttttatagttttgtttttgaggttataaaatttgtggtttttaagatatatatgcgtatatacgcgcgtgtatatatatattttatatatttattttttaatttagg

SEQ ID NO: 166 - DNA, 5512 bp, Artificial Sequence
  chemically treated genomic DNA (Homo sapiens)
tttagattaaaaaataaatgtgtggggtgtgtgtgtgtacgcgcgtgtgtgcgtatgtgtgttttgggggttataggttttgtgattttagagataaaattgtagagaggggaagaattggggattttagtgaagttaagattatttttattatcgtagtattttttttttttttttatttcggttatttaaatttaattttgacggaggaattggaaagaattttggtagttatgtgttttagttttttttttttttataattttgtaggtaagaaatggaagttttgagagggaaaggggtttgttcggggttatttagggttatatagtaggtacgtggttttattagtcgattgtgatttataaattagttagcgttttcgtttatttagtttagttatttatgaggttggttttatttttagaaaagtttagggagggatcgttttgagtttttttaatttcgaaattttttataggttttgttatagtagtgaatattttgtttagagttttagtttttttttttaagaggtttttttttacgaggtttaaggggtttggtaaggtcgggttggacgttttttattttttttgtttagttttttttttttttgggttttttttttgtttggtagcgggttggtagtattagaggaggggttagtttagttgtttatttatagtatagttgggttaagattgtatgttttgttggggggggtgtatttttatttgtttttttttttagttgttttttagagttgtttttttttttttatttttattttttttttttgttttttattattttttttagttttatttttttaattttagaggaaaaaaaaaaaaagaattttaaagttgtagaagttaaaatgtttgcgttttttttattttttttgtgtggttatagtgttttagttggtaggattacgaggaaaggaattgaaaattttaagggggtgtatggaggatgtagggaagttttgttttttagatgttttgtagggggttttagggaggaggaagtatagttttttttttttttttttttattttgagtaatggatttggtaggggagggttagatatagagttagggggttaattggaatgaaagttaagtgttatagttggaagtgattataaagatgattttataagtggaaaaataaaggttagagaggggaagtgattttgttatcgttatgtagtttgtcggtggttggatataaatttattgttatatttgggtgggttttatttggtatttgtgttttttagtagttttttttaggtaggtgtggaagttagttgatgggagtagattttttaggtttttaagtttttttatttaggtttggagggtagagggttatttttgttatgtattgatatttgggtatttgatggggtgggggtgtttgtttaagagagggggttttgtttgtttttttttaggtagttatttttttagattttttttttagggtttgtagaggtttgttgttttagtaggtagttttatttattaaatatttgttttggttgggtcgggtttggttttagtgtgggtagttttaggttttaaaaagttagtattgaggtgttagagtatagaatgggaaggatgggtttaaaagggtgtgtggttgtgtttttagagttttttcgtgttttttattttgattttgtgtttagtggttgtgtttttggttgattattttttatttggtttttgattgtaaggtttcgaatatttgtgttttttattgtatatttttttttttgggttttttttttttttttttttttgagatggagtttcgttttcgttgtttagattggagtgtaatggcgcgattttggtttatagtaatttttatttttaaggtttaagcgatttttttattttagtttttcgagtagttgggattataggtatgtgttattatttttggttaattttgtatttttaattttgtatttttagtagaggcggtgtttttttatgttggttaggttggtttcgaattttcgattttaggtgatttattcgtttcggttttttaaagtgttggaattataggtattagttattatgttcggtttttattttggtttttattttttttgtgttttttttttgtttttttaggtttttatttggttttttgattttgtttgggtttttttttatttttttaggtttgttttttttttgagatgtagtggggaggaggaggagttatggaatttttttaggatgggtaaagggtatttaagggagtagagggaagggtgttagagttgggttgggaagaggtgattgtagtcgtggttttagataatataattatttagaaatgttaaatttggggtttttttttgtttttagtttttttgtttgtttttttgtgtgggtgattttttattataaagtgttttggtgattttggggaattaggttgtggaggagaaaattgaggttacgggatgggggtttaggaagattagaaattgttaagggtttgattgagttgcggttcgaggttggtttttttgtttttaattgttttttatttttaaatttaagttatagtattagatggggagtgaggaaggattttagaaattttatagaaatatattttttaggttaggtgtagtggtttacgtttgtaattttagtattttgggaggttgaggtgggaggattatttgaggttaggagtttgagattagtttgattaatatggtgaaatttcgtgtttattaaaaatataaaataattagttgggcgtggtgttacgtatttgtaattttagttattcgggaggttgaggtataagaattttttgaatataggaggcggaggttgtagtgagtcgagattatattattgtattttagtttgggtaatagagttagattttgttttaaaaaaaaagaaaagaaaaaaaaaaaagtaatatattttttaaaagaagattttttatattttattaggaataataatagtttgtagtttaggttttagttggtatattatattcgtattttgaattatattaaggtatatttgtgtatagatatggttgtgttttttaatttaacggatttttttaataattttgaaggtagttagggttagaattatattttttgattagtttatgaaagaaatttgtttaaagttgtttggttagtaagtgtatagatggtattaggatttaagttgtcgggttttgtgggtagggttttagtataatttttttaagtttttttaagtttagtatatatcggcggagtgaagaggtttttttgggttgggttagtttattatttttttgcggtgcggagtatggtatttttattttcgtttagtttatatttttgttttattgaatgggatagtgtgttttgtgtatatttatatgaaggtgggtttgagtttatggattaagagaattattttaaagggtcgggtatggtggtttacgtttgtagttttagtattttgggaggttgaggcgggtgtattatttgaggttaggagttcgagattagtttggttaatatggtgaaatttcgtttttattaaaaatttaaaaattagttgggcgtggtggtgtatatttgtagttttagttatttagtacgttgaggtaggataattatttgaattagggaggtggaggttgtagttagttgagattacgtcgttgtattttagtttgggtaataaaagcgaaatttcgttataaaaagaaaaaaaaaaaaagagggagagagaaagaattattttaggttttttttttgttttgtttttgacgattaggtttgtttatgtttttattttggggagaatagattgaggttattttgatttgattttttttggggggtggagggaggtggtatagagatgtttttgttttttgtgttttaagttttttttttaaggagagtttttgttatatgggagttagaggggaggtggggtaggggtgaagggtttttttaagaaagttggaggttttttaggaagtatttttttattttgcggtaaaggggagaagttttggagtatttaaatattttgttttatttttattttgtttttgtttggatagtttatttgtattttagtttttatcggagaaggtttttagaagtggggttatgggtttatgtttagagtatattttatttttgaggttaggttttggtatttttttatagaaatgttatttttatttttgtttaagaagatagattaggatttagggagggtgtgtgtttatatgtatagggtgaggatttttgtgtaaatttgggggaagggaaggagttgtcggagtttgggtgaagttcgtttttgtcgttgttttttatttattattttttagggaagttattttatagtgaagttattaagagaatataaggttattttgtttgaggtatagtgattgttttttgtttttgggaatagtatgaggggaagggtgtggggttggatagggtgggtaggagaggagttttgttttttttgtttagttgtttagtttgtttgttttgggggagaggtttgtaggtcggtttttttttggacgaagagaagaggatgtagagtttgtgttaggtttatattttttagttagttaggtgggtaggaggagtttattttttgtagtttttttattgtagggttaggtttaggagtttggagagaggagagagggtatatagagttaggtagttgagtggaattggtattgttttgggtagttttgggttaagtttggttttttatttttatttatgatgattattaggtcgtttttttcgttgagttagttttttttttttttagtttaataagaaattttttgtgttttggttagtttagtatttaattttaagttttttgggggttgtgtgcgagggggttgagtattttttacgatattttttagtattttgttatttttttttgttatgattggagggggtttttttttgtagaatttgttttttattgttttttcgttttttaagttttagatttatttatattttttttgttttaagttttaaaaaagtgtttcggttaggtttttttttttacgttggttttttaattttaagtattagttttttttattttatttatttggaatgttattttttttttggttatttggtgaaattggttttattttttttagggttagtgtggtttagaggaaaatataaaggttttggagttataaggttttggtgtagattttggttttgttgtaggattttgagtgagtgagtttgttttttggatttaagtatttttatttgtaaagaaatagtaagatttattgttgggatttttgttaagatttagttataggttcggtgcggtggtttaagtttgtaattttagtattttgggaggttgaggtaggtggattatttgaggttaggagtttgaggttagtttgatt

SEQ ID NO: 167 - DNA, 6327 bp, Artificial Sequence
  chemically treated genomic DNA (Homo sapiens)
tttttttttgttaatgtgttatttttagtagcgataatataaatagagaatttatgtatatttatgtttttggcgtttttatttgatttttttttaatttagttatttttagtttgggatatataatttttatttatttaggaatatagagatagaatttaggggtgttatgaatttggatggagaaaaattatatttttatttttattaattttttatttaagtatagcgttttttttatttatgaatgtgggtaataaattgtagtagtattagtcgtggtggtgaatttgttattaatagaaattatagatgtatgtattttatgttatagatgttgtagattttttgaaaatattatttatatattattttttagagattatcgtaataagtttagttatttaatgtgttaaatatgaagtatatgtattgttatattgtattttaagttattttaataattattaaatatagttggttgttttttgtgtttatgtattttaatttatggatttaaaataattattttgaaatgagaattaaagtttttttattttatatatttaaaattattgttttgaaaataaatttgtttttaggtttttttagattgttaaaaggtttatggtataaaaaaggttatgaattttgattcggtaggagtttttaatggtgatataaatgtattaatatttaggtttgggatataggttgtattattgattttttgtgtggtttaaatgttttacgtttgttttgttatttattaaatgttttttgattttgtggtatttagtgtatttttttttttagtttttatattattttgagattacgattagtagtaattattttttgcgattggaaaaatattaaatgtagtgtttttttagtttgttaaattattgatttttattttttttgtggagaaggagaggaatatatttgaggataaattaataaggaatgattaagtattttttaggatggtagattatattttagaagttagtgttttttgttttttgttttgtttgtttgtttttttttttgtttgtttttagtataataggatagagtttttttagaaaagaatattatcgttagtttattttgtttaattttttttttttttagtttgaaaaagatttttttatgggattatggttgatttagtgaatgagttaaattttgttgtgataagagaagtatgaatgtaattttgtttttgtaattttagttagtgttagtgtggataaaattggatagttttttattttaaaatttttttgatttaggtttaaatttttatattttaggtatatatttgggtatagttttgataatatttaaatttttattgtagaattaaaggttagattatttagaaatgatttaggttagataaaaggtaatgtggtttggtatggtggtttacgtttgtaattttagtattttgggagtttaatgtaggtggatcgtttgaggttaggagtttgagtttagtttggttaatatggtgaaaatttatttttattaaaaatataaaaattagttggttgtggtggcgggtatttgtaattttagttatttgggaggttgaggtaggagaattatttgaatttgtgtgacgaagttgtagtgagtcgagattgtgttacgggaggttaaggttgtagtgggtattaagattggttattgtattttagtttgggtgataggagtaaaatttcgttaaaaaaaaaaaaaatggaaatgggtggggtattgtagtatttttgagttgaatgaggttttggggattatttggtttattttttttagttttggaaggagatttggtttgtttgggaattcgttagaatgtttggttagttgttgtttttttgtttttgtagtcgtaatgttttttttatacgttaatataattagttagttttttaatatttagtagtaagtataatatttggttcgtagtgttagtaaatgttggttttaaagtttggagtgtatagtattgtaattggtttatgggtttaattaggaatgtttttacggagagaggatgtgggtgtaagaggatagtgcggggagtcggaagttatgtggtgatttcgggttgcggtgtttttagtttattatgaatttttagtatagtattggattttttaatttagatataagtaggaaaggtaataagaaaggaattaggatggggaaatgtttcggggggtatagagatgattgaaaaatgtagttggtgtagtggttcgtttgtaattttagttttttgggagattgaggcgggtagattatgaggttaggagattgaaattattttggttaatatggtgaaaatttttttttattaaaaatataaaaaaattagttgggtttagtggcgtgtgtttatagttttagttattagggaggttgaggtaggagaattatttgaatttaggaggtagaggttgtagcgagttgagatcgtgttattgtattttagtttggcgatagagcgaaattttgttttaaaaaaaaaaaaaaaaaagattttatatatgtatatataaaataatattaaaaaaagaataaaatattataagttttttttttttttttttttttaatttattgtttttttttaatgaattattgttgatagtttggtttgaatttttttaggtttttgttttatatatatatatatatatatatatatatatatatatatatatatatttatatatttttgtaaagtgaattaaaagagtatataaataaagttaagattttttttaatgtatataatttttttattaggaagaaaatgataaattataatatttattttttattgttttatttttaaagataataattgtaattattaattttttttttttttttgagatagtttcgttttgtcgtttaggttggagtgtaatgacgcgatttcgatttattgtaatttttattttttgggtttaagtgatttttttgttttaattttttgattggttttgattataggcgtgcgttattacgttttgttaatttttgtatttttagtagagatggaattttatcgtgttggttaggttggtcgtgaatttttgattttaggtgatttgttatttttttttttttcgatttggttttttaaagcgttgggattacgggtgtgagttattgagtttcgttaattattaaatatttattgagtttttaatatgtattagatattgagttaaggtgttttatgtgtattattttatgtgtttttataatgatgtagtatttttgtattgatttttatttatgaggtatttgaaatatagagaggttaagtagattgttcgttatatagttagggtgagtataattaatagttaaatcggggttttggttttggagtttgtgtttttgattattatgtatatggttttattgatggttgagttacgtgaagatttttgtagagttagggtttggaaagggaagattttatttgttgtttaaagaaataggtaagtagagagtggggaggaaatttaaggaatagaaaatgataatgtgcgaaagtgtagagttgggaatatttatgagttttcggaggaattagaaagggtttagtgtttagaggagttgagcgtggagtaggtagtagattaatagtagtaagttaagaatattaaattgtttggggttagatttgggtttgtttgttagtgttttttaagtgtttttattagtatatgttaatttaagttatttgaaaaaagggatttttgtttttaagagtgaaaaatgtttgtataatgttcggtagtatgtgatgataaattatttttttagatttggaaaggttatttaatgtagttttaaagaggtttaagtattttttatagaatttacgttaaattattatttttatttgttttttgtttttttatttttgcgagattaaatatttttatttttgttttttatatattagggttttaagattttttattattttgtttttgtttttttaaatatagtttagtttggatattttagtttttatagagaggggttgaattttttaggtgaggtttgttagttaataagagagttgtattgttttttttattttaaattttattttattaacgaaatttataattattttttttttttattttattttgataatatattgttgatttatatttaattttttgttggtggtcgggtatcgtgatttacgtttgtaattttagtattttgggaggtcgaggcgggtggattatttgagattaggagtttaagattaggttggttaatatggtgaaattttatttttattaaaaatataaaaattagttaggcgtggtggtaggcgtttatagttttagttatttcggagattgaggtaggagaatcgtttaaattcgggagttggaggttgtagtgagttgagatggtgttatggtattttagtttgggtgatagagtgagattttattttaaaaaaagaaaaaaataaaaaataaaaaataaattttttattggttaaatatatgttgtatttatatataaatttaattaatattgtatttgattttgaataattaggaagagttggttataaaggaagaaataggagtattgggataaagtaattttttaattggaggttttaaaatagttagagagaaaaagttgaagggtgttgtttttatttttttttgttgtttttaagttaaaaaaagaaattatgtataatttatagcgttattgatgtttcgaaaggtgagaggtatatgtttgtgtttttgtggggttgtttttttttttaaaaatttgaaaatgaggaaatgaatttcgtaagttttgagtcgagaaaatttaatattttaggtttttggtaggatatgtgatattaattaggttttttataagatattggttttgagggttttttttttttttattttaggaatttaaatatgattaggaagatttttataaatattagggagcggtggaggtagtagaatgttaatagcgtttttgttaagttgaggaagtttatttttatttattttttagataaaaagttgagtaaaaatgaaacgtttcgtttggtaatgaggtatattaattttttggttaaggttttgggggagtaaagtttgtaataaacgggagtggttgtttaggggaatattttggggttttttttttaaggattttatttgttaggtttggaggatagaattttgtttgagaattattaggtttttttatttggtttaagttattatattttttagtgtggttttggttgttattttttagggtagtatttgtttagaaattattgtttgtggatagatttttgtatgttttagagttgatttgatgataattcgtgaagtatgaattttagttttttgggaggtggtttagagatagttgtagggagttgaaagaagttatgaggaatgttatttgtgggtcgttattttttagggatgttaggtagagcggtttatttttgtttattttaaatttaggttttgtataagatttttggagaaaaaattttaaataaaaaaaaaaaaaggttgaaaattattgtttatatttaatgtttttagttataagaaagaagtttttttataatggattttagatgaataagtagaatatgttttttttagaatatattttaaagtttgttttgaaaaatgagatttgattaagggtgaataaaataaattttaagattgatgggtcgggtacggtggtttacgtttgtaattttagtattttgggaggttgagatgggtagattatttgaggttaggagtttgagattagtttggttaatatggtgaaatttcgtttttattataaatataaaaatgagttaggtgtggtagtgcgtatttgtaattttagatatttaggaggttgaggtacgagaatcgtttgaattcgggagggggaggttgtagtgatttaagattatgttattgtattttagtttgggtaacggagtaagattcgtttttaaaaataataataataaaaaaagtttttttataatggattttagatgaatgagtagtagtatatgttttttttagaatagattttaaagatggttttgaaaaatgagatgtatttgattaaaggtgaataaaataaattttaagattgatgaatagaaagataatttttgtagaaattaatttgggagatttgcgggaaaaatttgtggagaaaagatatttttcgtttttcgtttattaaggtgtggggattata

SEQ ID NO: 168 - DNA, 6327 bp, Artificial Sequence
  chemically treated genomic DNA (Homo sapiens)
tgtaatttttatattttagtgggcggggggcggggggtgttttttttttatagatttttttcgtaagttttttaggttggtttttgtaggggttatttttttatttattaattttaagatttattttgtttatttttgattaaatgtattttattttttaaaattatttttaaaatttgttttgagggaagtatatgttgttatttatttatttgagatttattatgagaaaattttttttgttattgttgtttttgagagcgagttttgtttcgttgtttaggttggagtgtagtggtatgattttgggttattgtaatttttttttttcgggtttaagcgattttcgtgttttagttttttgagtatttgggattataggtgcgtattattatatttggtttatttttgtatttgtagtagagacggagttttattatgttggttaggttggttttaaatttttgattttaggtgatttgtttattttagttttttaaagtgttgggattataggcgtgagttatcgtgttcggtttattaattttaagatttattttgtttatttttgattaaattttattttttaaaataaattttaaaatatgttttgaaggaagtatattttatttatttatttgagatttattatgagaaaattttttttttataattgaagatattgagtataaatagtgatttttagtttttttttttttttatttagaattttttttttaaaagttttatgtagaatttggatttaaaataggtagaggtaggtcgttttatttgatatttttggggggtggcggtttataagtgatattttttatggttttttttagttttttgtagttgtttttgagttattttttaggaagttagaatttatgttttacgagttattattaggttaattttggaatatgtaaaagtttgtttataggtagtgatttttgggtaagtgttgttttgggagatgatagttagagttatattaaggaatgtggtggtttggattaggtgaaggaatttggtagtttttaagtagagttttgttttttaggtttggtaggtggggtttttgagggaagagttttagaatgtttttttgagtagttattttcgtttgttgtaggttttgtttttttaagattttgattaagaagttgatatattttattgttaggcgaagcgttttatttttgtttagttttttgtttggagggtgagtggggatgagtttttttagtttggtaaaggcgttgttgatattttgttgtttttatcgttttttggtatttgtgaagatttttttggttatgtttgagtttttgagatggaaagagaaagggtttttagggttaatattttataagaggtttgattggtattatatgttttgttaagaatttgagatgttagattttttcgatttagagtttacgagatttatttttttatttttaggtttttaaaaaagaaaataattttatagggatataaatatatgttttttatttttcgaggtattagtgacgttatgaattatgtataatttttttttttaatttaaaaataataggggaaggtaagaataatattttttagttttttttttttggttgttttgaagtttttagttgaaagattgttttgttttaatatttttgtttttttttttataattaattttttttaattgtttagaattaggtataatattgattgagtttatgtataaatgtaatatatgtttggttaatagaaagtttgttttttgttttttgtttttttttttttttgagatggagttttattttgttatttagattggagtgttatggtattattttagtttattgtaatttttagttttcgggtttgagcgatttttttgttttagttttcggagtagttgggattataggcgtttgttattacgtttggttagtttttatatttttagtagagatggggttttattatgttggttagtttggttttaaatttttgattttaggtgatttattcgtttcggttttttaaagtgttgggattgtaagcgtgagttacgatgttcggttattaatagagagttgaatatgaattaataatgtattattagaatgaagtaaaaaaagaaaatgattgtaggtttcgttaataaaataaaatttggaatagagaagataatatagtttttttgttagttggtagattttatttggaggatttagtttttttttgtaagaattaaaatatttagattggattatatttagaggagtaggaatagaatgatgaagggttttgaaattttggtgtatgaagaatagaagtgggggtatttagtttcgtaaaaatgaaaagataaggggtaggtgggagtggtgatttggcgtggattttgtagaagatatttgggtttttttggggttgtattggatgatttttttaagtttaggagagtggtttattattatatattgtcgagtattatgtaggtattttttatttttagaggtaagagtttttttttttaagtggtttggattaatatgtgttaataggaatatttgggaggtattggtaaataagtttaagtttagttttaggtagtttgatgtttttggtttattgttattggtttgttgtttgttttacgtttagtttttttgggtattgggttttttttagttttttcgaagatttatgaatatttttaattttatattttcgtatattgttattttttgttttttgaattttttttttattttttatttatttatttttttaaatagtaggtgagattttttttttttaagttttgattttataggagtttttacgtaatttagttattagtggaattatatgtatggtggttaagagtataggttttaaggttagaatttcggtttggttgttggttatatttattttagttgtgtgacgagtaatttatttaatttttttgtgttttaaatgttttataagtaaagattagtataggagtattgtattattgtgaggatatatgaaatgatatatataaagtattttagtttagtgtttagtgtatattaaaggtttaataaatatttaatgattggcgggatttagtggtttatattcgtaattttagcgttttgggaggttaagtcggggggggggggggtggtagattatttgaggttaggagtttacgattagtttggttaatacggtgaaattttatttttattaaaaatgtaaaaattagtagggcgtggtggcgtacgtttgtagttagagttaattaggaggttgagatagaagaattatttgaatttaggaggtggaggttgtagtgagtcgagatcgcgttattgtattttagtttgggcgatagagcgagattgttttaaaaaaaaaaagaaaattaatgattgtaattattatttttaaaaataaaatagtgaaaaataaatgttgtaatttattattttttttttaatgaagaagttatatgtattagagaaggttttagttttgtttatgtgtttttttgatttattttataggaatatatgggtgtgtgtgtgtgtgtgtgtgtgtgtgtgtgtgtgtgtgtgtgtgtagagtaaaaatttggaaggatttaggttaaattgttaatagtggtttattgggagaggatagtagattgggagaagagaaaaaaaggagatttgtggtgttttattttttttttggtattgttttatgtgtatatatataaaattttttttttttttttttttgagatagagtttcgttttgtcgttaggttggagtgtagtggtacgattttagttcgttgtaatttttgttttttgggtttaagtgatttttttgttttagtttttttagtagttgggattataggtatacgttattgggtttagttaatttttttgtatttttagtagagaagggtttttattatgttggttaggatggttttaattttttgattttatgatttgttcgttttagttttttaaagggttgggattataggcgaattattgtattaattgtattttttaattatttttatgtttttcgggatatttttttattttagttttttttttgttgttttttttgtttgtgtttgggttggggagtttagtgttgtgttaagaatttatggtgaattggaagtatcgtagttcgaggttattatatggttttcggtttttcgtattgtttttttgtatttatatttttttttcgtggagatatttttagttggatttatggattaattataatattatgtattttaagttttgggattaatatttattgatattacgagttaggtattgtgtttgttgttgagtgttgaggagttggttgattgtattaacgtgtgagggaagtattgcgattgtaggagtagagaagtagtagttagttaggtattttagcgggtttttaggtaggttaggtttttttttaaaattgaaaggggtgggttaggtgatttttaggattttatttaatttagaaatgttataatgttttatttatttttattttttttttttttgacggagttttgtttttgttatttaggttggagtgtagtggttaattttggtgtttattgtaattttggtttttcgtggtatagtttcggtttattgtaatttcgttatataggtttaagtgatttttttgttttagttttttaagtagttgggattgtaggtgttcgttattatagttagttaatttttgtatttttagtagagatgagtttttattatgttggttaggttggatttaaatttttgattttaggcgatttatttgtattgggtttttaaagtgttgggattataggcgtgagttattatgttaggttatattgttttttatttaatttaagttatttttgaataatttgatttttggttttataatgaaaatttgagtgttgttagaattatatttaagtatatatttaaaatataaaagtttaaatttgaattaaggggattttaaggtagaaaattatttagttttgtttatattgatattggttgggattgtaggagtaaagttatatttatgttttttttattataatagggtttagtttatttattaagttaattatagttttatgggggggttttttttaagttgggaggaaaaaagattaggtaggataaattaacgatggtgtttttttttaagagggttttattttattgtattagaaatagataggaaaaaaaataaataaataaaataaaaaatagagaatattagtttttgaaatgtagtttgttattttaggaggtgtttaattattttttgttgatttatttttaagtgtgtttttttttttttttataggggaaatagaaattagtggtttaataagttggaaaagtattgtatttagtgtttttttagtcgtaaggagtgattgttgttaatcgtgattttagagtaatgtaagagttaaaaaaaaaaatatattagatgttatagaattagagaatatttgatagatggtaaaatagacgtgaagtatttaggttatatagggaattagtggtatagtttgtgttttaggtttggatattgatgtatttatgttattattgaggatttttgtcgggttagggtttataattttttttgtattatggattttttagtagtttggggaagtttagggatagatttgtttttagaataatgattttaaatatataaagtaaaaaggttttggtttttattttagaataattattttaagtttataaattaaaatatatagatatagaaaataattaattatatttagtagttattaaaataatttaaaatataatatagtaatatatgtgttttatatttaatatattaaataattagatttattacgataatttttaaaaagtggtatgtaaatgatgtttttaaaagatttgtaatatttgtgatatgaaatgtatgtatttatgatttttattggtgataaatttattattacggttaatattattatagtttattatttatatttataaataaaggaaacgttatgtttagatgaaaggttagtggaagtaaagatgtaatttttttttatttaaatttatagtatttttgaattttatttttatatttttgggtggatgggggttgtgtattttaggttaagaatgattaggttggaggaaagttaggtagaaacgttaggaatatggatatgtataaattttttgtttatattgtcgttattgaaggtaatatattagtagagaaaag

SEQ ID NO: 169 - DNA, 7934 bp, Artificial Sequence
  chemically treated genomic DNA (Homo sapiens)
agttgttgggttattgggtatatgtatgtttagttttagtagatattgttagttttttgaagtgtgttaatttgtatttttattagaaatgtatgagagtttcgattgttttatatttttgttaatatttggtattgttatttttttaagtttagttattttggtgattaaaattattgatttttataaaaattttgtgatgtattggtattgttataatttttattttatagataagggggttggggtttagtaaggagaagttatttattttagattacgtaggatgttagtagtaagtgggtaatagtaggtttgtgtgatttttttgtttttgtggttgtatgaattttttattttttttttttgagatagagttttattttggtatttaggttgaggtgtagtggttttatttcggtttattgtaatttttattttttggatttaggtgatttttttattttagttttttgagtagttgggattataggcgtatattattacgtttggttaatttttgtattttttgtagaaacggggtttcgttatgttgtttaggttggtttttaatttttgggttttagtgatttgtttgttttggttttttaaagtgttgagattataggtatgagttatagcgtttagtttgtatgaaattttaaagttagaatatttgagtgtgttaaataattttttatttttataattattttttatagcgtttatttttatttgatagtagaaatataatttggttattttttggtaaatttagttaagtaagtgtatgattatttagttattttagggaatatttagttgagtgttttgtttttttatttttatttaggggtatggttgtattttgtggaggttatgtggttatggtatggagtgggaagtgagggggttaaggttgtttggtttttggttatcgttatttttttttattgtttagggaggtaggtagattttatttttgttagttgtgggttgtcgtttttggtttttattgtgtttatagatgtttgtattcgtgttatggtttttggtttggattgtggttttagtgttttttttattaggtttattattatagaagtttttttttggttatttgtttttttttagtaattttatgttgttttagggttttataatatatgttaatgttttttgggatttttataaattaggtatgggtttgagatgtttttagggttttttgtttaggtatatttagttgttatttttatttgattgttattatatttttttattatggaagattatttagattttatttatagatagattttttttttttttagaatttttaaatttatttggggttttaatttttttttatttttgggttgaggggatgggagaatgagagagagtttttttttagagatttatattagaagttaatagtatgtagtgtttttttttttattttaagtttggtatatattttttttttaatttttttaatagaggaaggtgaggtttagagaggtgaagtaagttatttaagattatataatagaggtaggtggtttgattttagagtggttatgtttatttttgtattagaggattaagattgagagagttgatatatagtaggatgtagttaggggattttttattatgtggattgaatatttttagtttatatgttgttttatgggatggaatatatgtttaagtttatagtttgttttatggatgggtgtataagaaatggaatgagaattgaattttgggttgtaaagttttgtttgtttgtttattttgagatggatttttgttttgtcgtttaggttggagtgtagtggcgtgattttcgtttattgtagtttttattttttgggtttaagtaatttttttgttttagttttttaagtagttgggattataggcgtttattattatgtttggttaattttttttttttttttttttttttttgtatttttagtagagacggggttttattatgttggttaggttggttttaaatttttgattttaagtgatttttttgttttggtttttttaagtgttgagattataggcgtgagttattgcgtttagtcgagggtttcgttttagatgtattgatagggttgttttttataggaatttttttgtgaatgttttatagtaatgaagattttaatgaagatttaaaaaggaagattatttttggaattgaatttattataaaaattggatttttttatttggaatatttgaatttaaggttttagtttttttggaggtagtatgttgggaatagttgtaaattagaaaatgtttttgtatttgaggaatggggttaagattgattgtttgggttgtgatggtagatacgtagttggagttggagtgacggttgggaaagtttttttggttttgttttttttttttgtaggataaggggttttgaatattttttggtgtggagtatgtggagtgattggagtaagggtggagttttagtttttttagggttagttttggaaatataggtatttttgttttttatatttatatatgtatttatacgtattaaggggattttgtgggggttagttttttttgatttggggtgattattatggataaatgaatggagaggagttatttttagtttgttttatcgtgttatagttattttggttttttcgagtggaggtttgagagaaggtagggttgatttagaaagtatggcgttaaattagttatttttgacgaatatttttggtttttttttggtagtgttttattattgatattttattatataggtttatgtatttattttgggtttgaggattatttggagaattggtttaaagggtagaaaaatttgtttttagggagttattagattgagagtggatttaggaatttgtattttttttgagttaatttatttttaaagttaaaaaatttgaatatgtaatatatttatgtgaattgatatttaaaagatataaaggggtataaggtgaaaaattattttaatttattttttagtgatttagttttttttttttgaggtgattaattttttgtgtattttttttgagataatttatatatatagtattatatataagtaaatgaaatatgttttatttatttttttgagattgggttttattttattatttaggttggagtgtagtgatattattttggtttttcgtaatttttgttttttgggtttaggtgatttttttattttaatttttagagtagttgggattatacgtttatattattatatttatttaatttttgtttttttgtagagacggggttttattatgttgtttaggttggttttaaatttttgagtttaagtgatttgtttatttcggttttttaaagtgttgagattataggcgtgagtttttacgttcggttttaaaatttgttttaaaagtagatattttttggtgattttaataaagggggtttttagatatatttggaaaaatatatttttatttttatgttagattttgtgttgggttttcgggttgtgtgatttgatattgtatagttttgtttagaatgtttaaagagagttaataaggtattattttttatgttataggcggggagtaaaggggttttagtgggttttgtttaggaggtttgaagttagagttgttgagggtagggttgtgttgtaaagaaaatgtttgagagttgtaggcgttttattttttgttattagttgtggtatttggtagatattggataggtttgtagataaagatttggtaatttaaggagttgtttggtttttttgtttagttttattttagaggtattgtatatttttggtttttttagggggttttgtgtggaagtattttttgtttttttggtgttagggatattattacgtgtttgttggttaggcgagttcggcgtttagttttttaggatggggagagtaatgttttcgagtagaatagggtggggtttttagattatttttttttttttatagttggttttattttatcgattttattaaagtttttttgggagtattttagagaagagttacgtttaggtcgggttttggttgtttggtttacggcggaatttttagtattacgtttcgtacgtcgggtttaaagtatgtttagtgaaggagtaggtatttattgttagatggagttatttttttagatttggggtttttttataacgatggttatgtttggtatggaagtttttttagaagttaatagtaggaaataagggttaatagtatttaattgtggagtaaggtttaaattttagttttgttatttaatcgtttcgaatttgtttttttattgtagaggcgaaaaggttaatattattttatttcggagggttatcgtggagaatggaagttggataagttgtattagtttagtagtaaaatatatatatataagcgttttatttttattttattttattttaggaatgaatatatatattcgcgcgcgtatatatattttaggaatgaatatacgcgcgtatatatatacgtagttttttttaggagtgaatatatatatatacgtttcgttttgttgtttttaggaatatatatagagacgtatatattcgttcggttttgttttttttaggttttttaattggggttttttattcggtttagggtatcgttgtttgaaagatttttttaggttagtcggggttcggtatttagttgacgagatagcgcggcgtttttagagttggggagaggcgaaaattttttcggtttttcgatttttcggttagtcgttttcggtagttttttgtcgtttttcggtttgggttcgtttagtcgttttcggtttgtcgttaggcgatttcggcggttagtttagtcgcgatgtgacgtcgcgcgtttcggggttttcggcgtttgcgtttttttttataaagtagacgtcgcgtcgcgttgcgacgttgtagtggtttcgttttcggttttttttttttttcgttaacgtttttcggttttcgttagtttttcgtcggtcgtttttttaatatcgaatatcgtgagtagtcgtttattgaattggaaagggtcgtggttatcggattgcgtgtcggttggttttatcgttgcggtttgggtttgttcgcggcgggcggtgattgggtttggttttttttcgggttcggtggatcgcgttgtcgattttgtttttcgggagatattattaggtttcgtttatttgtttcgttttcgatttagcgaggttttttttggtcgggcgtttttacggcgttttataagtgagtcgaatttcgggttgggttttttttgtatcggtcgagcgttagtcggcgcggagttcggttgtaaggtttaggttgcggtcgggggttttttttggttttaagtttgttgtttcggggattagggcgggggtggcggcggggttgtgaatgggggttttttggttgtcgtgagcgtgggcgtgtgtcggtgtttggtttttgttgtggtcgggagggagagttgcggtggtggtttgaggtcgttcggtttttggtttttattttttttttatcgtgtttggcgttattagttatcggtcggttttggttaatcgtgtgcgggcgtcggttttttgtatatagtcgtttgttttatttgaatattttttagcgttgttttgttatgatttggagtcgttgagtagatattatcgttagagtggtgtgatttgtaggagttttaattgtgtataatttaattttaggtatttggtttttaaagaaataggacgtttatttgttttgatttatttttaatggaaattttacgtttgggttttagggatatgtattttttttttagagcgtgatagtagaatgtattcgttttatagaataatatcgttttttttattgtgtagtttaaaaagtagtgttagaatttcgggttatttaaagcgtaggggttttttttttatatgatgtgatagaattcgttttatgttggttatggagaattatttataagtgtaggagtttttaggtttttttttttagaatggaattgttttgaaagtattttaaataaatattttatttattattatttaaaaattttgtattttattttattgtaatattaaaatttatttttgagtttagtattattaagtgtatcgaattatagattaatcgattgattagttgttatttagtaaggttttaatttttttaagagtaatttaatttataaatttgattatgattaagtatttattttgagttatttgaaagaaatatgaaacggtcgttttgtttttagagtaattttaattaattgtattgttagatttgtgattttgtattgtttattttagtattatttaatataaaaattatatgtttaaatgttttataattaaaaattgggtttaggttaaaatatttttttttggagatattttttgttgtggttttgttataggaagggttttttattttgtatttttttttattaagtagggataattgtattattggtaagcgttaagtaatatggagaagtagatatgtttgtgaatcgtaaagtgaaatttgattttttttaattatggatgagtgagagtaggatattttagtggttggttttaaaatatgttttatttttttgttttttttgtttaataatttgtttgttttggggttggcgataattgttttagagaagttgaatgaatattttaatcgatgtaatgggttataagtttttgaatataaaatgggtgtgatgtatgttttaaatgttaaatgatatatttttgggaaaatatatgcgatttgtaatataatatatttagaaaattttagaggtgttataagttaatagtgatattatcggattatgaatatttgagaagtatgggttttttaaaagttgtatgtgagttttaagaggttttgaattaatttgtataaggtattgttattttttttgttgttgttgttttttttgtttgtatgtttttttttttaaaaaaagaatttgaagatggtaagaaattgttggatttttaattttaaatgtttttttttttttttttgttagaatttaagttttttgaaattaaatgtttaattttttatgtaagattatattttttttttaacgatttataattaatttgaattaataaatgcgtttttagagtaagtaaaaggttattattatggagattttgttaagagattttaaagttggttatttggatagttagtattgaaagataaaaagggttttgaaatgaagtttttaagtagatttagggaattgtatttatatttgtttatttttaaattattttatttttttgtatatggttttgtattgttttagatataaatgagtatattttgatgtattttttggatttgaatttatttttataggtaggatttattgtggggaaaatttttattttatttagtagcgttgtttgttttggattgattttttttaggttcgtatgtagttaattgtggtagttaattgtttagatggagtttagtatttagtgggagacgaaaggtaggtagaaagtaaatataaatatgtatgttttattaaatttatattaatagtgagtttagtagggtaggttttaaaagtttttgtttttagtagttatattttgaaaaaattttaatagaaatattcggagattaatttgtgaataattgtttataatagtgttttatagggttatgtattgtaggtttttagaattttgtggttaataagttagagttttttgatggattgtagttgatgaaatgttatgtagaatttttttttttaaattttatatttaatgttttttttttttaga

SEQ ID NO: 170 - DNA, 7934 bp, Artificial Sequence
  chemically treated genomic DNA (Homo sapiens)
tttaaaaaaaaaggatattaaatataaaatttaagagagagagttttatatgatattttattaattatagtttattagaaggttttaatttattgattataaagttttaagaatttataatatataattttgtaaagtattgttgtaagtagttatttataagttagttttcgagtatttttattaaaatttttttaaagtataattattaggaatagaagtttttaaggtttgttttattgaatttattattggtataaatttaataaaatatatatatttgtatttgttttttgtttgtttttcgttttttattgaatattggattttatttgaatagttaattgttataattaattatatgcgaatttgaggaaggttagtttaaaataaataacgttattaaataagatagaaattttttttatagtgagttttatttgtgaagatgagtttagatttaaagagtatattagaatatgtttatttatgtttgaggtaatgtaagattatatataagagaataaaatgatttaaagataagtagatgtgagtataattttttaaatttatttaaaagttttattttagagttttttttattttttagtattgattgtttaggtgattaattttgagattttttggtaagatttttataataataattttttatttgttttgaaaacgtatttattaatttagattaattatgagtcgttaggaaaaagatataattttatataaaaagttaagtatttaattttaaaggatttgagttttggtaaaaaaaaaaaaaaaggtatttaaaattaaaagtttaataattttttattatttttaaattttttttttaaaaaagaaaatatataaataaggaaaataataataataaaaagaatagtaatattttgtatagattaatttaaggttttttaaaatttatatataatttttaaaaggtttatgttttttaagtatttataattcggtgatgttattattaatttatggtatttttgaagttttttaggtgtgttgtattataaatcgtatatatttttttaaaagtgtattatttggtatttaaaatatgtattatatttattttatgtttaaagatttatgatttattatatcggttaaaatatttatttagtttttttgagataattgtcgttaattttaaagtaaataggttgttaggtaaaggaagtaaaaaagtaaagtatgttttaaaattagttattgaaatattttatttttatttatttatagttggagagaattagattttattttgcgatttataaatatgtttgtttttttatgttgtttagcgtttgttaataatgtagttgtttttgtttaatggagaaggatgtagagtagaggattttttttgtgataagattataataaaaggtatttttaaaagaaaatattttaatttgagtttaatttttaattataaaatatttaaatatgtaatttttatattagatagtattgaaatgaatagtgtagaattataaatttaataatgtagttgattaaaattattttaaaagtaagacgatcgttttatattttttttaaataatttaagataagtgtttagttatagttaagtttgtggattgggttatttttaagggagttgagattttattaaatagtagttggttaatcggttaatttgtaattcgatgtatttggtaatattaaatttaaagataagttttagtgttatagtagaataaagtgtaaaatttttaagtaataatggatgaaatatttatttgaaatgtttttaaaataattttattttaaagaaagaggtttaaaggtttttgtatttgtaaataattttttatggttagtataaagcgggttttattatattatatagaaaaaaaatttttgcgttttaagtgattcgaaattttgatattgttttttagattgtatagtggaggagacggtattgttttatgaaacggatatattttattgttacgttttaaaggaaaaatgtatgtttttaaaatttaaacgtgaagtttttattaaaagtgaattaaagtaggtagacgttttatttttttaaaagttagatatttagagttaagttatatatagttaaggtttttataagttatattattttgacgatggtatttgtttaacgattttaagttatggtaaaataacgttaagaaatatttagatggagtaggcggttatgtgtagaaagtcggcgttcgtatacggttagttaggatcgatcggtagttagtgacgttagatacggtggagaaaggatgggagttaagaatcgggcggttttagattattatcgtagttttttttttcgattataataaaagttagatatcgatatacgtttacgtttacgatagttaagggatttttatttataatttcgtcgttattttcgttttggttttcgggatagtaggtttaagattaagagaggttttcggtcgtagtttgggttttgtagtcgagtttcgcgtcggttgacgttcggtcggtgtagagaaggtttagttcggggttcggtttatttatggagcgtcgtgaggacgttcggttagaggaggtttcgttgagtcgggggcggggtaggtgaacggaatttggtagtgtttttcgaagaatagggtcgataacgcgatttatcgggttcgaaagaaggttaggtttagttatcgttcgtcgcgggtaggtttaaatcgtagcggtgaggttagtcggtacgtaattcggtagttacgattttttttagtttagtgggcggttatttacggtgttcggtgttaaggagacggtcggcgggaggttgacgagagtcgggaggcgttagcgaaggaagagaaaaatcgaagacgaagttattatagcgtcgtagcgcggcgcggcgtttgttttataggagagggcgtaggcgtcgaggatttcggggcgcgcggcgttatatcgcggttgggttggtcgtcgagatcgtttgacggtaggtcgagaacggttgggcgggtttaggtcgggaggcggtaaggagttgtcgggggcggttggtcgggggatcggggggtcggaagagttttcgtttttttttagttttgaaagcgtcgcgttgtttcgttaattgggtgtcggatttcgattggtttagaaaggttttttaggtagcggtgttttaagtcgagtgaaagattttagttaaaaagtttggaaaaaataaaatcgggcgagtgtgtgcgtttttgtgtgtgtttttgggaataatagaacggggcgtgtgtgtgtgtgtttatttttggggggggttgcgtgtgtgtgtacgcgcgtgtgtttatttttgaggtgtatgtgcgcgcgcgggtgtgtgtgtttatttttggggtggggtggggtgggggtggggcgtttgtgtgtgtgtgttttattattgaattgatatagtttgtttagtttttattttttacggtaatttttcgaggtgaaatagtgttagttttttcgtttttgtagtgagggaataggttcggaacggttaagtggtagagttaggatttgaattttattttataattaggtgttgttagtttttattttttattattgatttttaaagaggtttttatgttaaatatagttatcgttatagggaaattttaagtttagagagatggttttatttagtagtaggtatttatttttttattaaatatgttttgagttcgacgtgcgaggcgtggtgttggggatttcgtcgtgaattaggtagttagggttcggtttggacgtaatttttttttagggtgtttttaggaaggttttgatgaggtcgatggaatgaagttagttgtaaaggaaagggagtagtttgaaagttttattttgttttgttcgggaatattattttttttattttaggagattgggcgtcgggttcgtttagttaataggtacgtgatgatatttttgatattaggaagataaaagatatttttatatagggttttttgaagaaattagagatgtatagtgtttttgggatgggattgggtaggaaggttaagtagttttttgagttattaggtttttgtttataagtttatttagtgtttgttaggtgttatagttgatgatagaagatgaaacgtttgtagtttttagatattttttttgtagtatagttttgtttttagtagttttagttttaggttttttaggtagggtttattggagtttttttgtttttcgtttatggtatagaaggtggtattttattaattttttttaagtattttaagtaggattgtgtagtgttaggttatatagttcggggatttagtatagggtttggtataaaagtagggatatatttttttaaatatgtttgagaattttttttattagaattattaagaaatgtttgtttttaaaatagattttggggtcgggcgtggaggtttacgtttgtaattttagtattttgggaggtcgaggtgggtagattatttgaatttaggagtttgagattagtttgggtaatatggtgaaatttcgtttttataaaaaaataaaaattaggtgggtgtggtggtgtgagcgtgtagttttagttattttggaggttaaggtgggaggattatttgagtttaggaggtagaggttgcggagagttaagatggtgttattgtattttagtttgggtgatagagtgagatttagttttaaaaaaataaataaaatatattttatttgtttgtatatggtgttatatgtatagattattttaggaaagatatataagaaattggttattttagaggaagggaattaggttattgagggatgggttagaataattttttattttatatttttttgtattttttgggtattaatttatatgaatgtattatatatttaaattttttaattttaaaaataaattggtttaagaaaaatgtagatttttgggtttatttttaatttaataattttttgggggtaggtttttttgttttttaaattagttttttaggtgatttttaagtttagagtaagtgtataaatttgtgtagtagggtattagtggtgaagtattgttaggaaggagttaagagtgttcgttagaggtgattagtttagcgttatattttttggattaattttatttttttttaaatttttattcgggagggttaaggtagttgtagtacggtgggataggttgggagtgatttttttttatttatttatttatagtgattattttaggttagaaaggattggtttttatagagtttttttggtacgtgtggatatatgtgtgggtgtgaggagtaggggtatttatgtttttagagttggttttgaggaagttgaggttttatttttattttaattattttatatgttttatattaaggggtatttagaattttttgttttatagaggaaggaaataaaattaaagagatttttttagtcgttattttagttttagttacgtatttgttattatagtttaggtagttaattttagttttattttttaaatgtaggaatattttttaatttataattgtttttagtatattatttttagggaaattaaagttttggatttaaatattttagatgggaaaatttagtttttatgatgaatttagttttagaaatgatttttttttttaagtttttattggagtttttattgttataaagtatttataggaggatttttatgaggagtaattttgttagtgtatttaaaacgggattttcggttgggcgtagtggtttacgtttgtaattttagtatttggggaggttaaggtaggaggattatttgaggttaggagtttgagattagtttggttaatatggtgaaatttcgtttttattaaaaatataaaaaaaaaaaaaaaaaaaaaaaaaattagttaggtatggtggtgggcgtttgtaattttagttatttgggaggttgaggtagaagaattgtttgaatttaggaggtggaggttgtagtgagcggagattacgttattatattttagtttgggcggtagagtaagagtttattttaaagtaaataaataaataagattttgtagtttagaatttagtttttattttattttttatgtatttatttatgggatagattgtggatttagatatgtgttttattttataggatagtatgtaagttagaagtatttagtttatatggtgaagggttttttggttgtattttgttgtgtgttaatttttttagttttggttttttaatataggggtaagtatagttattttgaagttagattatttgtttttgttatgtgattttgggtaatttattttatttttttgggttttatttttttttgttgaaagagttggaaagaaggtatatgttaggtttggagtggggaggagaatattgtatgttgttagtttttagtgtgggtttttgagaagggatttttttttatttttttatttttttaatttagggatagggagggattaggattttagataggtttggaggttttgagagaggggagaatttgtttgtggataaggtttaaataattttttatgatgagaaagtatggtagtagttaagtagaaatggtagttgggtatgtttaagtagggggttttgggagtattttaggtttatgtttaatttgtgagaattttaggaagtattagtatgtgttgtgaggttttagaatagtatgaagttgttgagagggggtagataattaggaaagaatttttgtgataataaatttaataaagggagtattaaagttatagtttaagttagagattatggtacgaatgtagatatttgtgggtatagtagaaattagagacgataatttataattggtaggggtgaaatttgtttgtttttttgagtagtagaggaagatgacgatgattaaggattagataattttaatttttttattttttattttatgttatgattatataatttttatagaatgtaattatgtttttggataggagtggagggatagaatatttaattgagtattttttggaatgattgggtgattatgtatttatttgattgaatttgttaggaagtggttagattatatttttgttgttaaatggaaataagcgttgtagaaagtaattatgaaaataagagattatttgatatatttaaatattttgattttaaaattttatgtaggttgggcgttgtggtttatgtttgtaattttagtattttgggaggttaaggtaggtagattattggagtttaggagttgaagattagtttgggtaatatggcgaaatttcgtttttataaaaaatataaaaattagttaggcgtagtagtgtgcgtttgtagttttagttatttaggaggttgaggtgggaagattatttgagtttaggaggtggaggttgtagtgagtcgagatagaattattgtattttagtttgggtgttagagtgaaattttattttaaaaaaaaaaagtaaaaaatttatgtagttatagaggtagaggaattatatagatttgttgttgtttatttgttgttaatattttgcgtgatttgggataagtggtttttttttgttgagttttagtttttttgtttgtaaagtggggattataataatattaatatattataggatttttgtgaaaattagtgattttagttattagaatggttaaatttaaaagaatgataatattaagtattagtaaggatgtggaataatcggagtttttatatatttttggtgggagtataaattggtatattttagaaaattggtagtatttattaaaattaaatatatatgtatttagtggtttagtaatt

SEQ ID NO: 171 - DNA, 6239 bp, Artificial Sequence
  chemically treated genomic DNA (Homo sapiens)
ttatagtttttttagaagaatagaaatagtaagttttgagttacgattgtatttgaatgttattttatttgaagtttgaattagggataatttgattttagaagaataaaatgaggtttttaatatttgttttaaattgtaaggaaatgagggtatttttttttttttttttttttttgagatggagtttcgttttatcgtttaggttggagtgtagtggcgcgatttcggtttattgtaagttttatttttcgggtttacgttatttttttgttttagttttttgagtagttgggattataggcgttcgttattacgtttagttaattttttgtatttttagtagagacggggttttatcgtgttagttaggatggtttcgattttttgatttcgtgattcgttcgtttcggttttttaaagtgttgggattataggcgtgagttatcgcgtttagttgaaatgagggtattttttaagaggtagatgatagaatttattgtaatgaatttgttaagtttaaggttaaggatatagtttttttataaggtagtttttattttaaatgttaggtgtaattggggatttttgggttatttttatttttgatcgtttggttgtattgagggtttttattattttttgtggtttaataatttattagaatgatttatggaatttaggaaagtgtttcgttttataacgatagtttttatgatagtaaatagatatagattagaattagttataagaaaggatatagagggtgaggtgcggaaggggtttaagtgtaaagtttttagttattttttttttagatagttatttttttttagttatgatgcgtgatgatatttagagaatattgttaattagagaagtttttgaggttttggtgtttagcgtttttgggggttttgtttttgttgttgttgtttttgagatggagtttcgttttcgtcgtttaggttggagtgttgttgcgtgattttagtttattgtaatttttattttttgggtttaagcgattttttcgttttagtttttagagtacgagtagttgggattataggtatgtattatgtttagttgattttgtatttttagtagagatagggttttattatgttggttaggttgattttaaatttttgatatttggtgattcgttttttttagttttttgaagtgttgggattataggtatgagttattgttagttagtgtttagcgttttttagtggggtttgattttttattgttagtgtggttgattttttatttttagttttttttgagttaatttttgtgtatttagtttatttggaggttggaattgatataggatgttttaaagtttttattatagattatattgttagattatttggtggttaaaggttttaggtaaatatagatatttttattagataggacgttaaggggtttagagattattttttagtaattgaaggtaaagataatttttttattgtatattttttttttttttttttttttttttaagagatagggttttattttgtcgtttaggttggagtatagtgatatatttatggtttgttgtagtttcgattttttgggtttaagtaatttttttgtagttgggattataggttgtatgatgattattgttaattataaataaatattaataaaatgaataaaagaataatttttaaatttaaaaaaaaataataagatatataataatatataatatataaaataataaataagttattatttattatatttaataaaagaaatattaaaaaaattaataaattataaaaacgttaattaaaaataaaaaaatatataataaaatatatatttttaataatatttaatacggttagattttaatttattttttaagatttatattatatttattcgatttacgatatttaggtatttattaaaataaataaaaaaaaaataaatattaaaatgaaatataaaataaaaattttaaaaataagataataaatataaaaatatataattttaataaaattgaaaattgagatgaggaggaattttagaatataggaatttaagattagtttgggtaatatggtgaaatttcgtttttattaaaaatataaaaaaaaaaaaaaaaaaaattagttgggtgtagtggtgtatatttgtagttttagttattcgggaggttgaggtagaaggatgatttgagtttaggaggcggaggttgtagtgagtttagattatgttattgtattttagtttgggtaatagagttaaattttgttttaaaaaataaaaataaataaaaatgaaaaaaaaaattagaattgtatatatgaaatgggtgaattgtatggtaagtatattttaataaagttataataatatttttattgatttatatattattaaattcgtttttttaaaatgtgtaatttattgggttttaataaagttatagagttgttcgatattattataattaattgtagaatatttttattattttaaagaaatttagtattatggagtggttattttttattttttttttttatttaggttttgataattataaatttattttttgtttttatggatttgtttgttttggatattttagataaatggatttatatattatgtagtttttagtgattatttttttatttagtattatgtttttaaggtttatgtatgttgtggtatgtattggaattttatttttttatatgattaaataatatattattgtattggttggatgcggtggtttatgtttgtaattttagtattttggggggttaaggcgagggtattatttaaggttaggagttcgagattagtttggttaatatggtaaaattttatttttattaaaaatataaaaattagttgggcgtggtggtatatatttgtagttttagatattcgggaggtttaggtaggagaattgtttgaattcgggaggcggaggttgtagtgagttaagattgtattattgtattttagtttgggtaatagagcgagatttttattttaaaaaaaaaaaaaaagaaagaaaaaaatatatatgtttatattattgtatggttaagttatattttgtttatatatttattaggtgatgaatatttatgttttttttattttttggtttttgtgaataatgttgttatgagtatttacgtataagtttttgtatagatatttgtttttaattttttggggttttgtatttattttaattttaaaaatatattgtataaaaatgttatttattttgatgattgggttttttggtatttttttaaaatttgtatttgggttgttaggtatggtggcgtacgtttgtaattttaatattttgggaggttgaggtgggcggatggtttgagtttaggagtttgagattaatttgggtagtatggtaagattttgtttttataaaaaatatatatataaggtcgggtatagtggtttatatttgtaattttagtattttgggaggtcgaggcggacgaattatttgaggttaagagtttaagattagtttggttaatatggtgaaattttaatttaataaagaatataaaaaaattagtcgggtgtagtggtatgtgtttgtaattttagttatttcggaggttgaggtaggggaatcgtttgaatttgggaggcggaggttgtagtgagttaagattgttttattgtattttaagtttgggtgatagagtgagattttgttttaaaaatatatatatatataatttaaatatatataatatatatatataaaattagttgggtgtcgtggtgcgtgtttgtagtgttagttatttgggtatttgggtggttgaggcgggaggattatttgaatttaggaagttaaggttgtagtaagttatgatcgcgttatagtattttagtttgggtgataaagtgagaatatagtttaaaaaataaaaaaataaatttgtatttgaggtaagtgttatatttattttaatttagttttattttgtatgttttttgttttgttggttgtatgattttggataagttatttaatcgtttagagtttcgatttttttttttataaaatggggataatttttgtaattgtttatagttggtagtagaatgtaatgaagtgaattcgtttttatagagttagtattgtttttggtatatggtaattttaatatatttttttttatagggaggtttggtgttaggtcgggagtggggtggaagggttttaaaatggatggaagggttttaaaatggtcgtgagtattttttgtttttgagaagagttagtttagttgtttagagttttttgttgttgtcgttttcgtaagtagtaagtatttttggtttttttgttttagtatgatgtttttataaggttttttcgggggtgggatttaacgttgtttttttgatggtttttttggtttttagtattttttattttagttgtttagggttttttatttgcgttttttttatttttttttttgtttatttttatcgtaggttatagttttttgttttttttcgttgttatgaggtttgtattttgtagggttgaagtttaaagtttagttttttcgttaagtatacggataaatatgaattttggagaatttttttagttttaatgtaaatagaataggtaggggttttgatttacgggtcgttggggttagggttgggggttgggggtgtttatagggtttggttagtggggttttgggggggtagtgggtgtaaggagtttggtttgtgtttgtcggtcggtaggtaaacgtaatttacgcggtgggggaggcggttagcgtggtggattcgggtcgcgtggttttgtggtagtcgagttatggtttttaaattgagttagttgtagacggagtttttggcggttttgttcgagttagggttgagtaaagaggtattgatttaggtattgggtgagtcggggttttattttttggttggagaaggttttttggataagggggagttttgcggcggcggtcgaggggagttggttgagttgtttaatgggttgggggagattcggggtttcgaggacgagacggacgacgatggggaagattttacgttatttatttttaaagagttggagaattttagttttgaggaggcggtttattagaaagtcgtggtggagatttttttgtagtaaggagttttgtttcgttttcgtttttaggagagtttagaggggttttttttagtttttaacgagttttttttttgagttgagtttttatgatttttagtttttagtttagttgttgggaagggggatagggtttatgagagtttaggggtttttgtttggaggtttgagtttttagtttttgaattgtttttttgtagagttttaaattttatgagtttaggtttttagtttagtttttgggtaagggggatattttttaggggggtttaagatgggagaaaaagtaggtgagtttataatttaaatgtttggagaattgggaggtggtggaaatttttagttattttgattatttatattttttagattttaatttttgtattgagtttttagtgggtaggtttcggggtttaggaagtattgttagggaggagggttcgaagttggggtttgggggtttttttggttttttagggatttatgcgtttagttagggaagtttaggttttttttatttgaggtagatagagtttcgaggtgggagttgttttttttttttgtatggttataggtattttattttattagtaggcgttattagaggttgttcgttttatatttttattcgttggcggatttttcgttttttggagaattgggtgggttttgagttcgatgttttttttttttttagtagagttgatttagttattaattatttatgtgttttattattttttttttgttttataaatttataaatggtaaaaggttttgataaggtttgtgattattaatttgtaggaatggtggtttggaaagatttgggttaatttattttttatttagtgggggtgggggatgggggtgtgggggagaaggaaggatggtttgggggttataggggttatttttttttagcggttttttgatttttattttatagcgtttgtttgaggaggtttattattttttgggcgttgtgttgaggttttataggaataatttt

SEQ ID NO: 172 - DNA, 6239 bp, Artificial Sequence
  chemically treated genomic DNA (Homo sapiens)
gaaattatttttgtgaaattttagtatagcgtttaggaagtagtgaatttttttaagtaggcgttgtagggtggaggttagggagtcgttggggaggggtggtttttgtagtttttaggttattttttttttttttttatatttttattttttatttttattaggtgggaggtgggttggtttagatttttttaggttattatttttataagttaatgattatagattttattagagttttttgttatttataaatttataaaataaaagagaaataataaagtatatgggtaattagtaattaggttagttttgttgaggagaggggaggtatcgagtttaggatttatttagttttttaggagacggggagttcgttagcggatggggatgtagaacgggtagtttttaatggcgtttgttggtgaggtggggtgtttgtggttatataggaaaggggagtagtttttatttcgaggttttgtttgttttaggtaagaaagatttgggtttttttggttaaacgtatgagtttttaggaggttaggaaagtttttaaattttagtttcgggtttttttttttggtagtgttttttgggtttcggagtttatttattgaggatttagtgtaggagttagggtttggagagtataaatgattagagtggttaaaaatttttattattttttagttttttaggtatttgagttgtgaatttatttgtttttttttttattttggatttttttgggaaatgttttttttgtttaaggattgggttaaaggtttgggtttatgggatttgggattttgtagaggagtagtttaggggttggaggtttaaatttttaagtaaggatttttgggtttttatgggttttgtttttttttttagtaattaggttaaaggttgaaggttatggggatttaatttagaaggggggttcgttaggagttgaggggggtttttttaggtttttttgggagcggggacggggtagggttttttattgtagaagggtttttattacggttttttggtgggtcgtttttttagggttgaggttttttagttttttgaggatgggtggcgtgaagttttttttatcgtcgttcgtttcgttttcggagtttcgagttttttttagtttattgggtagtttagttagtttttttcgatcgtcgtcgtaggatttttttttgtttagggggttttttttagttaggaggtagggtttcggtttatttagtgtttggattagtgtttttttgtttagttttgattcgagtagggtcgttaggagtttcgtttgtagttggtttagtttagaaattatggttcggttgttatagggttacgcggttcgggtttattacgttagtcgttttttttatcgcgtgggttgcgtttgtttgtcggtcggtagatataaattaaattttttgtatttattgtttttttaaaattttattagttaagttttgtgggtatttttaatttttaattttggttttagcggttcgtgaattagggtttttgtttgttttgtttatattggagttggggaaattttttaaggtttatatttattcgtgtgtttagcgaagggattgaattttggattttagttttgtaaagtgtaggttttatggtagcggagagggatagggagttatggtttgcgatgggagtgggtagaggggagggtgggggaggcgtaggtgaggggttttgagtagttgggatggaaggtgttgggagttagggaggttattaggagagtagcgttgggttttattttcgaaagaattttgtaggggtattatgttgagataggagagttaaaaatgtttgttgtttacgagagcggtagtagtagggagttttagatagttgggttagttttttttaagggtagaggatgtttacggttattttggggtttttttatttattttgggatttttttattttattttcggtttgatattaggtttttttgtaggaaaaaatatgttaagattattatgtgttaagaatagtgttggttttgtgagggcgaatttattttattgtattttgttattaattgtgagtagttatagagattatttttattttatagaggaggaaatcgaggttttgagcggttaagtaatttgtttagggttatatagttagtaaggtagaaaatatgtaaggtgagattgagttgggatgagtgtgatatttgttttaggtgtaaatttatttttttattttttgagttatgtttttattttgttatttaggttggagtgttgtggcgcgattatggtttattgtagttttgattttttgggtttaggtgattttttcgttttagttatttaagtatttaagtagttggtattataggtacgtattacgatatttagttgattttgtgtgtgtgtgttgtgtgtgtttgggttgtgtgtgtgtgtgtttttgagatagagttttattttgttatttaggtttggagtgtagtggagtaattttggtttattgtaattttcgttttttaggtttaagcgatttttttgttttagttttcggagtagttgggattataggtatatattattatattcggttaatttttttgtattttttattgagttggggttttattatgttggttaggttggttttgaatttttgattttaagtgattcgttcgtttcggttttttaaagtgttgggattataggtgtgagttattgtgttcggttttgtgtgtgtattttttgtggagatagggttttgttatgttgtttaggttggttttaaatttttggatttaagttattcgtttattttagttttttaaagtgttaggattataggcgtgcgttattatgtttggtagtttaggtgtaaattttaagggaatgttaaaaaatttagttattaaggtaaataatatttttatgtaatatgtttttaaaattaaaatgaatgtaaaattttaaagaattaaaaatagatgtttatataaaaatttgtgcgtgaatgtttatagtagtattatttataagagttaaaaagtggaaaaaatataaatatttattatttgatgaatatataaataaaatatggtttgattatgtaatggtatagatatatatatttttttttttttttttttttttttttgagatgggggtttcgttttgttgtttaggttggagtgtagtggtgtaattttggtttattgtaattttcgtttttcgggtttaagtaatttttttgtttgagtttttcgagtatttggaattataggtatgtattattacgtttagttaatttttgtatttttggtagagatggggttttattatgttggttagattagtttcgaatttttgattttaggtgatgttttcgttttggttttttaaagtgttgggattataggtatgagttatcgtatttagttaatgtaatggtatattatttggttatataaaggaatggagttttagtatatgttataatatgtatgagttttgaaaatatgatgttaagtgaaaaagtggttattaaagattatatagtgtgtgagtttatttatttgaaatgtttagaataggtaaatttatagagataggaagtggatttgtggttgttagggtttgggtgggagaagggaatggggagtggttattttatggtgttgggtttttttaggatgataaaaatgttttataattgattgtggtgatatcggataattttgtgattttattaaaatttaatgaattgtatattttaaaagggcgagtttgatggtatgtaaattaataaaaatattgttgtagttttattgagatatatttattatataatttatttattttatgtgtgtaattttgatttttttttttatttttatttatttttattttttgagatagggtttggttttgttgtttaagttagagtgtaatggtatgatttgggtttattgtaattttcgttttttgggtttaaattatttttttattttagtttttcgagtagttgggattataggtgtgtattattgtatttagttaattttttttttttttttttttgtatttttggtagagacggagttttattatgttgtttaggttggttttaaatttttgtgttttagagtttttttttattttagtttttagttttgttgggattatatgtttttgtatttgttgttttgtttttgggatttttattttgtattttattttggtatttgttttttttttgtttgttttgataaatgtttgagtgtcgtgggtcgagtaggtgtgatgtaaattttgggaagtaggttggggtttggtcgtgttgggtgttgttgagggtgtgtgttttgttatgtgtttttttgtttttagttgacgtttttgtagtttgttggtttttttggtgttttttttgttaagtatagtgagtggtggtttgtttgttgttttgtgtgttatgtgttgttgtgtgttttgttgtttttttttgggtttgagggttgtttttttgtttattttgttagtgtttgtttgtggttaatagtagttattatgtaatttgtagttttagttataggaggattgtttgagtttaggaggtcgaggttgtagtaagttatgagtgtgttattgtattttagtttgggcgatagaatgaaattttgttttttaaaaaaaaaaaaagaaaaaaaaaggatgtatagtaggaggattatttttgtttttagttgttgggaggtgatttttaggttttttaacgttttgtttgatggaagtgtttgtgtttgtttggggtttttggttattagatagtttaataatgtgatttgtaatgaaggttttggaatattttgtattagttttaatttttagatgagttggatatataagagttagtttaggagagattggagatgaaaggttagttatattggtagtaagggattaagttttattaaaaaacgttggatattggttggtagtggtttatgtttgtaattttagtattttaggaggttgaggggggcgggttattagatgttaggagtttgagattagtttggttaatatggtgaaattttgtttttattaaaaatataaaattagttgggtatggtgtatgtttgtaattttagttattcgtattttggaggttgaggcgggagaatcgtttgaatttaggaggtggaggttgtagtgaattgagattacgtaatagtattttagtttgggcgacgagagcgagattttattttagaaataataataataaaaataaaatttttaaaaacgttggatattaaagttttaggagtttttttggttagtagtattttttgagtgttattacgtattatagttggggggaggtgattgtttggagagaaggtaattaggagttttgtatttgaatttttttcgtattttattttttatgtttttttttgtggttggttttgatttgtgtttgtttgttattataaaaattgtcgttatgaggcggggtatttttttgagttttatgagttattttagtgaattattgaattatagggggtagtgggaatttttaatgtagttaagcggttagaagtgagggtggtttaggaatttttagttgtatttggtatttgaagtgaaggttgttttgtggagggattgtgtttttagttttgagtttgataaatttattgtagtaggttttgttatttgttttttagagaatatttttattttaattgggcgcggtggtttacgtttgtaattttagtattttgggaggtcgaggcgggcggattacgaggttaggagatcgagattattttggttaatacggtgaaatttcgtttttattaaaaatgtaaaaaattagttgggcgtggtggcgggcgtttgtagttttagttatttaggaggttgaggtaggagaatggcgtgaattcgggaggtggagtttgtagtgagtcgagatcgcgttattgtattttagtttgggcgatagagcgagattttattttagaaaaaaaaaaaaaaaagagaatatttttatttttttgtaatttgggataggtgttaggagttttattttatttttttgaaattaaattatttttgatttagattttaggtaaggtggtatttaaatgtagtcgtgatttagggtttattatttttatttttttaaaaagattatgg

SEQ ID NO: 173 - DNA, 6180 bp, Artificial Sequence
  chemically treated genomic DNA (Homo sapiens)
gggggtatgtttttatatttgaatatagtatttatataagttatttaagtgttttaaatagtggataaaaatgatattggtaaggagtagagaattatttttatttattaatatttagagggaaaagacgaaatttttattaggaaatattataatagtgggaggtttttgttggttggtggaaaagaatgcggagagtagatggttggttattagtagaatttggtttatgagagagtaaaaagttttggtttttagtttattaatgatggtagtgttatgaattgaggataatatttattaaatttattgttatataaattatttttgttagttataaggggatagttatttttttttttttttttttgagatagttttatttttattgtttaggttggagcgtaatggtgtaattttggtttattgtagttttcgtttttcgggtttaagtaatttttttgttttagttttttaagtaattgagattataggcgtatgcgattatgtttagttattttttgtattttttgtagagatagggtttttttatattgtttaggttggtttgaaatttttgggtttaagtaattcgttagttttagttttttaaagtgttgggattatgggtataagttattgtatttggttagttatttttttatagagtagaaagttattatacggtttattagtcgttaatttcggattttagtggataacgttaggaggttagttattttattcggagagtaatttattatttttgttaaatatttgatttgatttttttttttttttttttttttttttagttttttagaatatttgttttttaaaaagggtttaaggttaagttaatttgttaaggaagtaaaaagtttattgttttagttatttttttttttgattataaaggtttttttgggtaattttggtgttttataaaatatgtatgtgtgtttaaggatgaagtgtgtgtgttgtgtgtgtggggaggttgaaattatgttgatagaatttttgtgtttgtttagtagtggattatagtgaatggatagtgaattaagttttattagattgttgggtatcgtggtttatgtttataattttagtattttgggaggtttgaggtgagaggagtatttgagtataggagtttgagattagtttgggttatatagtgatattttgtttttatgaagaaaaatttaaaaattagttaggcgtggtggtatgtatttgtagttttaggtattttagaggttgaggtgggaggattatttaattttaggaggtaaacgtgtagtgagttgagattgtgttatagtattttaatttgagtaatagagtgagattttgttttaaaaaaaaaaatttattagattataatttttttgagggtagtatgggttttagattttttgttttgaaatatttaatattatgttcggtatgtgagaaatgtatattaaatattttttaatattaatttatcgatagggattaatttatattatataaatagtattattaattaatattgaatttgtattatttagttgtttttttttgagttttttaataaaggtttttggttttatttagatgtgttagtaaaggtttagaaatgagttataagtgatataaaattttattttttatattttttttgttttttatataagttagagttattataggagatttattggtgggaattatttttttttattaaaaatgatataagtaaaggttatattatgaaaaataattttatgttataatgttaaatgaatgatagttttaattttagttttttttttttgggtttattatgtttttggtattacgttaggtgtatggtattgatagatgtatgttagttcgaatttttaaggggtttataatttaataaggaaaataaattataaagtaaaattatacgggttataatagatatgaaaaattttattaattagtttttaagtaatgagggagtttttatgattgaaggtttgggtagatagatattttttttttgtattagttgtgtgagtaggatgagaagagaattttgaaaatagtatgaatttaatatgtgggattatatattttttttttttgtaagatttttttttagttttattgtggagttatagaattttattatagtgttatggttttaatgtgttttttaaagtttatgtgttgataatttaatttttaatgtaaaagtgttgagaagtgagatttttaagagaaatttttaagagggtagagtttttatgaatggattattttttattgtgtgtgtttatttgttacgggataatacggtaagaaggttttttaaagatgttagtgttatgtttttggatttatcgggttttagaattatgagttaaataaatttttttataaattatttagtttatggtattttgttagtagtaggagaaaatgaattaaaatatatgggaatggggttttaaaaatgatttaattagattttttatttgacgtttatgtttttgttattaaaaaaatggttattggggtggtattgtgtagattatattagattatagataatagaaaattcgaattttattggtttaattagtgaagatagatttgaatttagaagttgtttgatttagagttttaaaaatgttattaaagttaggtacggtggtttacgtttgtaattttagttttttgggagtttgaggagggtagattatttgaggttaggaattttagattagtttggttaatatggtgaaattacgattttattaaaaaaataaaaaattagttgggtatggtggcgcgtatttgtaatttttgttatttgggaggttgaggtaggagaatcgtttgaatttgggaggcggaggttgtagtgagtcgagattttgttattatattttagtttggtgatagagttagattatattttaaaaaaaaaaaaaaaaaagttattaaagattagatttttatgtatgtttgtttttttgatgttttttttattttaattcggttagatttgtatttggaagatggttatttattatttaggggattcgtttttttgaggatatgtagaaagaatgggttatttttgaagcgtttttagaaaatgaaagaaaaattttttttaataaagattaggaaattgttttttttattggtttaaatatgttacgtttattgttagttaataattgtggtagggaatgggattttgttgatttaggttggaattatgttacgttgtttagattgggattatatgtttttgtaagtaggtagagtagggatgtgatttagaattgggtttgtttattaagataaggaagagtggatattggggagtttaggttattataagttttaggtatagttaatgtaaagttttggaaatttatttgatagtttcggttgtatcgttcgtttttcgtatttggggtttttaaatttcgggatttaattaattgaaaataaaaaatgtagttaggtttattaggtttgaaaatatatgaaaatatagagtttaaaatatagtttgaaaatgtattgaaaatatagagatttttttggatgattattttttaaatatattttaataattatttatatagtatttgtattgtattaggttttataagtaatttagatatgatttaaagtatatggggaaatatattatttttatgtaagagatttgaatattttagaaaatttagagtttgggaattaattttacggatatagagataattgtattaattatagtaatggtatatggtagttgaatttatttttttttttattttagttcggaatttaaaggtttttttttgttatgttgttttcgggcgttggttgtttttttttatttgttattttggaagtgttttttttttttagtgttttttttgcgtgggttttatcggtttttattgtatttatttatttaagaggtaaaataatggttgttatttaagaaaattttattttagtttagaatcgaagaattggggtttattttgttttttttttattttggggtttttttgaggttaagtttagaatttgtgtataagatagtggttgtgtgatagagttatttagggttgttttcgttagatgaagagattggtttgatttatttttaagaattagttttacgtgtagttcggttgtttcgaatgggatttgggtgcgaggggttgattggagatgtggggtttgggtgagtggggtatttgagaatttgaagtttataaggttttgtttggtttgaggtacgttttgttttttttttcgtattcggttttgtatcgaatttgatcggtcgcgtttattttcggaacggtcgaggaggatgggtttttcgtttttatacgcgcggtgtttgcgtcgattgtagtttttttggacgggagtttttgggtttagtttagggtggcgtttagcgtgatttattcgggaatggtagtttttagtgttttgcggtttcgggtttcgggaagttcggggatttgggtagcggatttagatgtttttatagttgtgttttcgtcgtttcgtttcgggggtcgagaattagtaagattaacgcgaggaggcgttacggtatttgttatttcgtttttaggaggttcggacgaggtttcgtcggcgagcggtcggggtttgtttttcgaggtgtttgcgagcgttttatgtttttttttatcggttttaatttcgtttcgttttattcgatcgcgggttttgtttattcgtcgcggtgcggttttttttagttttcgatagttttttttcgttttttttgtcggttttattttttaggcggcggagcgggtcggggagggaagggttaattcgcggtttttttcggcgcggagggattcggaggcgagtcgagcgcggtggtgaggtcgttttagcgaaaaaaatgttcgtttgaagagatttataagttttattcggggggatcgatagttcgtttcgggaggaaggggcggttaggttcgaaagtcgttttttttttttagattcgagagttcgtgcggggtaaagtgaatcgagtcgttgggcggtgtaaggggaagtttaagttcgttttttcggttaaagtgaattttaatcggggtggttggatgcggagacggggcggtaggtaattgcgggttagcgagcgggagtggggcggcgcggcggggttgggggttgcggggcgtcgtcgcgtttttgtcggagtgggggcgttttcgtttttcgttttaatttcgcgtttttttgtatagcgcgaaattcggggttttttttaagttggggagcggagtgggggcggaggttcgagtcgcgggcgtttaggttcgttggcggcgcgttcggtttgtgcgtttcgttcggtgttcgattcgggtcggcgtttaggtttcggggcgcgcgggagatcgggcggtttcggtcgcggagttaggtttattgttcggtaggttcggggtagggtagtaaaagtgggaggaggtcgagtttggggaggaggacgtcggtcgagagcgagattagttgtcggggtttttgttttttgtttaaaaacgttttttggatgagttgggggtgtttttcgattttttgggttcgtcggggacgttcgggcggcggcggtcgtagacgcgggtttgcgagcggcgcgttttttgtaatttgttagttttattgttgtcgagcgagtgagttatttcgtattttcgttcgtcgtcgtttcgttcgttggacgtcgaattgttttttatttcgtttttcgagattttagtcgcggtcgggttcggcgcgcggagtattcggcggcggcgcggagtagggggcgtcgaggaggtggtagagattggttcggaaatttgggggagaggcggcgagttgcgggagtcgtcgcgtcgatttcgggtcgcggcgaggaacgcgtggatttcgggattcggcgcgggtattgagttttttcgttttttgttcgcgtcgcggtgggagcgagtcggggttttggaagttatttcggcgtttttagcgtttttgcgtaattttttttagtatttttttttgtttttttatatattttgggtttcggtggtttttcgttgagttcgttttttttgttttagg

SEQ ID NO: 174 - DNA, 6180 bp, Artificial Sequence
  chemically treated genomic DNA (Homo sapiens)
tttagggtagaggaaacgggtttagcgagagattatcgaggtttaaagtgtgtgagggaatagagagaggtattggggaagattacgtaagagcgttgggggcgtcgggatgatttttaggatttcgattcgtttttatcgcggcgcgagtaaggggcgggagggtttagtgttcgcgtcgggtttcggaatttacgcgtttttcgtcgcggttcgagatcgacgcggcggttttcgtaattcgtcgttttttttttaagttttcgagttagtttttgttattttttcggcgttttttgtttcgcgtcgtcgtcgggtgtttcgcgcgtcgggttcggtcgcggttggggtttcgaggagcggggtgaggggtaattcggcgtttagcgagcggagcggcggcgagcggagatgcgaagtgatttattcgttcggtaataatagaattgataagttgtagggaacgcgtcgttcgtaggttcgcgtttgcggtcgtcgtcgttcggacgttttcggcgggtttaggaggtcggaaagtatttttagtttatttaaggggcgtttttaaatagaaaatagaaatttcgataattagtttcgttttcggtcggcgtttttttttttaggttcggtttttttttatttttgttgttttgtttcggatttgtcgaataatgagtttggtttcgcggtcgaagtcgttcgatttttcgcgcgtttcggagtttgggcgtcggttcgagtcgggtatcgaacggggcgtataggtcgagcgcgtcgttagcgggtttgagcgttcgcgattcgagttttcgtttttatttcgttttttaatttggaggggatttcgggtttcgcgttgtataaaggggcgcggagttgaggcgggggacgggggcgtttttatttcggtagggacgcggcggcgtttcgtagtttttagtttcgtcgcgtcgttttattttcgttcgttagttcgtaattatttgtcgtttcgttttcgtatttaattatttcgattaaagtttattttggtcgggagaacgggtttgggtttttttttgtatcgtttagcggttcggtttattttgtttcgtacgagttttcgggtttgggagggggaggcggttttcgggtttggtcgtttttttttttcggggcgggttgtcggttttttcgaatagaatttgtgggtttttttaggcggatatttttttcgttgaggcggttttattatcgcgttcggttcgttttcggattttttcgcgtcgggaagagtcgcgggttaattttttttttttcgattcgtttcgtcgtttaggaagtggggtcggtagagggggcggggaggagttgtcggggattgggaggagtcgtatcgcggcgggtggataaagttcgcggtcgggtgaggcgggacggagttggggtcggtggggaggggtatgaggcgttcgtaggtatttcgagaagtaggtttcgatcgttcgtcgacgaagtttcgttcgggttttttgggagcggggtggtaggtatcgtggcgttttttcgcgttggttttgttggttttcggttttcgaagcggagcgacggagatatagttgtggaagtatttggattcgttgtttaggttttcgagtttttcggaattcgaggtcgtaggatattgaaggttgttattttcgagtaggttacgttggacgttattttaagttgggtttagaggttttcgtttaggagggttgtagtcggcgtagatatcgcgcgtgtggagacgggagatttatttttttcggtcgtttcgagagtaggcgcggtcggttagattcgatgtagagtcgaatgcgggagaaagggtaaaacgtattttaaattagataaagttttgtgagttttaggtttttaaatattttatttatttagattttatatttttagttagtttttcgtatttaaattttattcggagtaatcgaattgtacgtgggattagtttttgggaatggattaagttagtttttttatttaacggagatagttttgggtggttttgttatatagttattgttttgtgtataagttttgaatttggttttagagaagttttagagtagaaagaagataaaataagttttagtttttcgattttgggttgaagtgagatttttttgaatggtagttattgttttgttttttaggtaagtgagtgtagtaaagatcggtaaggtttacgtagaagaaatattgaggaaagaagatatttttaaagtaataaatgggaggaagtagttaacgttcgaggataatatggtaagaaggagtttttggatttcggattgggatggaaagagaggtagatttagttattatatgttattattgtagttagtatagttgtttttatattcgtgggattggtttttagattttggattttttaagatgtttaagttttttatataaaaatggtgtgtttttttatatattttaaattatatttagattatttataaaatttaatataatgtaaatgttatgtgaatagttgttaaggtgtatttaggaaataattatttaaagaaatttttatatttttagtatatttttaggttatattttaggttttatatttttatgtatttttaggtttggtaagtttaattatattttttgtttttagttgattgaatttcggaatttggaaattttagatacggagggcggacggtataatcggagttgttaggtggatttttaaggttttgtattggttgtatttgaaatttatggtggtttagattttttagtatttatttttttttattttggtaaataagtttagttttgagttatatttttgttttgtttatttataggggtatgtggttttaatttaagtaacgtagtataattttaatttaaattagtagaattttattttttgttatagttattggttggtaatgagcgtaatatatttgggttaatgagaggagtaattttttggtttttgttgggaaaagttttttttttattttttgagagcgttttagaggtaatttattttttttgtatgtttttaaaaaaacgggttttttggatggtgggtagttattttttaaatataagtttagtcgggttaaaataaagaagatattaagaaaataaatatgtatagagatttgatttttggtgatttttttttttttttttttgagatgtagtttggttttgttattaggttggagtgtggtggtaggatttcggtttattgtaattttcgttttttaggtttaagcgatttttttgttttagttttttaaatagtagggattataggtgcgcgttattatgtttaattaattttttatttttttagtagagtcgtggttttattatgttggttaggttggtttggaatttttgattttaagtgatttgttttttttaggtttttaaagggttgggattataggcgtgagttatcgtgtttggttttggtgatatttttgaggttttgaattaagtaatttttgaatttaggtttatttttattgattagattaataggattcgaattttttgttgtttgtaatttagtgtggtttatatagtattattttaatgattatttttttagtagtaaagatataaacgttaggtaggaagtttgattagattatttttaaggttttatttttatgtgttttagtttatttttttttattgttaatagaatattatagattgagtgatttataaagaagtttatttggtttatggttttggagttcggtaagtttaagagtatggtattggtatttttagagggtttttttgtcgtgttatttcgtggtaagtgagtatatataatagagagtaatttatttatgagggttttatttttttagaagttttttttaaaggttttattttttaatatttttgtattgggggttaagttgttaatatatgaattttgggagatatattgaaattatagtattgtgataagattttatgattttatagtaaaattggaaagaaattttgtagaaggagaaggtatgtgattttatatgttggatttatgttgtttttaagattttttttttattttgtttatataattagtgtagaggaagaatatttgtttgtttaaatttttagttataggggtttttttattatttagggattgattggtgaagttttttatatttattatggttcgtatagttttattttataatttattttttttattagattgtgaattttttgagggttcggattgatatgtatttgttagtattatgtatttaacgtagtgttaagagtatagtagatttaaaaaggaggagttggaattaaagttattatttatttgatattataatatgaagttattttttataatatagtttttgtttgtgttatttttaataagagaaaatgatttttattagtgaattttttataatagttttgatttatatagaagataaaaagaatataaaaagtggagttttgtattatttataatttatttttgggtttttgttgatatatttagatagggttagaagtttttattgaaaagtttagagagaaataattaagtaatataaatttagtgttaattaatagtattatttgtgtagtataagttaatttttatcgataagttaatattgaaaagtatttaatgtgtattttttatatgtcgggtatggtgttaaatgttttaggatagaaggtttaaaatttatattgtttttaagaaagttataatttaatagatttttttttttgagatagagttttattttattgtttagattaaagtgttgtggtataattttagtttattgtacgtttgttttttgggattaggtgatttttttattttagtttttgaaatatttgagattataggtgtatgttattacgtttggttaatttttaaatttttttttatagagataaggtattattatatagtttaggttggttttaaatttttgtgtttaagtgttttttttattttaagttttttaaagtgttgggattataggtatgagttacgatgtttagtaatttaatagagtttagtttattgtttatttattgtaatttattattggatagatataggaattttgttaatatggttttagtttttttatatatataatatatatattttatttttgaatatatatgtatattttatgggatattagagttgtttagagaaatttttatagttaaaaggaaaagtagttaaagtaatgggttttttgtttttttggtagattgatttaattttggattttttttagaagataagtattttaggaagttaagaggagaaggagagagagaagagaattaagttaggtgtttagtaggggtagtaaattatttttcggatgaagtgattggttttttaacgttatttattaagattcgaggttgacggttagtagatcgtatggtagttttttgttttataggagaataattggttaggtgtagtggtttatgtttataattttagtattttgggaggttgaggttggcggattgtttgagtttaggagttttagattagtttgggtaatatggagaaattttgtttttataaaaaatataaaaaatagttgggtatggtcgtatgcgtttgtagttttagttatttgggaggttgaggtaggaggattgtttgagttcgggaggcggaggttgtagtgagttaagattgtattattgcgttttagtttgggtaatgggaatgaaattgttttagaaaagagaaaaggagaataattgtttttttgtgattaatagggataatttatgtaatagtgagtttaataagtattatttttagtttatggtattattattattgatgaattaaaagttaagattttttatttttttatgagttaaattttattaatgattaattatttatttttcgtatttttttttattagttagtaagaattttttattgttgtggtattttttggtagagatttcgttttttttttttgaatgttgatagataaaaatagttttttattttttgttaatattatttttatttattatttaagatatttagatggtttatatgaatgttatatttagatatgaggatatgttttt

SEQ ID NO: 175 - DNA, 5252 bp, Artificial Sequence
  chemically treated genomic DNA (Homo sapiens)
tttgggtgatagagtgagattttgttttaaaaaataaataaataaaaagatgttgtgtttaaaagttatgtaaatattaattgtttgatgttatagttagtagaaggtagagtttagatttgatattaggtagggcggcgttagagtttgtatttttaattttgatgtttaaatggttttttaagtttttaagatttaggtagcgatttagaatttttttttttttttttggaaggattagacgttttttttgtgtattcgtagtatttgtgtatttttagtaaatagggattgttatagtttgtgagatgttttatttttgtttttttaattagatatcgggtgtgacggggtttgattttatttttgagtttggtttgatattaggaaatgttattttttgtgttttataattttttggagggagaaattttttggtttggtatttggaattttgtaggatttttttttcggatatttgaggtttcgggtttgtcgttgtttttttttgggtttttttttttttttttttgtttggtatatgtatttatgttttatagtttaatttagttatcgattttttttgatatttggggtagggttagttagttttttttgtggtttcggtgtttttagtttggtattattattgatagttgtttggaatttggtttgttttttttattagattttgagtattttgagagtaaagatttgggcgatttaattgggtgtttaggtaaacgttaaagaaagtaagtagtgagtttttcgaaattttgtttttttattatatttttttttttagaaattttttatggttttttgttattaataaattttatttaagaagaatgggaaggttgggcgtagtggtttatgtttgtaattttagtattttgggaggtcgaggtgggcggattatttgaggttaggagttcgagattagtttggttaatatggtgaaattttatttttattaaaaaatataaaatagttaggtatggtgttgtatatttgtaattttagttatatataaggttgagggaggagaatcgtttgaattcgggaggtggaggttgtaatgagttaagaatatattattgtattttagtttgggcgatagagggagattttattttaaggaaaaaaaaaaaagaataggaatggtaataggattgtttttttaagagtgagtttgagtatttatgagataagttagtgtttttttaatttgggtatgagaaaaggttttaggttattttttttttttttgagacggagttttgttttgtcgtttaggttggagtgtagtggtacgatttcggtttattgtaagtttcgttttttaggtttacgttattttttcgttttagttttttgagtagttgggattataggtattcgttattacgtttggttaattttttgtatttttagtagagacggggtgttatcgtgttagttaggatggtttcgattttttgaatttatgatttatttgttttcgttttttaaagtgttgggattataggcgtgagttacggcgttcggttttaggtggtttttaaataattatatatttatttttatatagtgattttgtttttgttaaatgatattagttttttatttatggtagtaatttgttttttttttagataaatttaagaaaaaaagttttagatttaaagaatatgttaagtaaataataggataagcggtttatagatgtggtaaaaattttgtaatcggttatgtgaattagtgaagtttgggaaattttaagttgagttttattatgattagtaagtttagtatataggaaggatttaagaagtatgagttttataatgtaatatatatttagtggaaaagggaacgggttggggtgaaataaaaaaaaaagaaggttttggaaaaggttgagaaggagatatatttagttataagtagttagggagttagggggtttggtaggagagataggagatggggaggggtatagagtgggaggaagtattttttgaagttttggtttgtttgttgatatattttttaatttttattataattttagtaaattgtaggaaaggagaagatagttagaatttagtattttttaaaaagaagtttgtattatttttttttgggagattttgtttagagttttttgttaggaatattttttgtttttttattattttattattttatagtttggcgatggttttgattgaattttcggaaagatttagttgtgtttttttttgtatattttcgatcgttggttttttttttttttttttatagtttttttttttttttttttttgttgttttttcgagattagttaagagtttatttgttagagatatttcgaggtttggggagggatagtagcgttttttaaaaatttgtttcgataaagtttttttttattattgagcgatgatttttttttagaagatttggtttttttttattaattttattagtatgtaggttttacgataataggtgttttagtttgttttgtttattggcgagtttttagtttcgatttgtgtaagacgtagtatatttttatgatcgttattttgttaagatttattggaattaagtggtgtagattttaaatgtatttgtaaatttttttattttttttttgtttttagttttgaaaatatattttgaaattttttgtttttttttttttttattagatattgttttgtattgttggtttatttatgtgtttatttagaagttttaggggttaatttttatttatttattttttaaagatggagtttggttttgatatttaggttggagtgtagtggcgtagttttggtttatttgtaatttttattttttgggtttaagcgatttttttgttttagttttttgagtagttgggattataggtatttgttattatgtttagttaattttttttttttttttttgtagagttaaggttttattatgtaagttaggttggttttgaatttttgattttaagtgagcgatttattttggttttttaaattgttgggattataggcgtaagttatcgcgtttcgtcgtaggggttaattttgaaataaattaggtatggaaatttagttgtaaaattttagagattattttaaggcgattaatttataacgtggttattgttgatttgatattagtttatgttttaggtggttcgtgatttaagatagttttcggagtaagatatatatattttgtatttagtattatttttgtatgttttttatttaaagtttttttttttaagtttttttttttagcgttaaagtttgaaatggttttttaaagatattagtttggttattttttatttgcgagtatttgattagtaaagttgttttatttttattattttttattttttttgtttttgagtagtagaaatttgagttggttatattatcggttttttttcgtttttaggtttttgtataggagttttttgtaattaaagtggtttttttttttattttgtttttttttttttttttttttttttgagattatgttttgttttgttatttaggttgtagtgtagtggcgttattatagtttacggtagtttcgattatttgggtttaagcgattttttcgttttagtttttcgatagttgagatgataggtacgtattagtacgttcggttaatttttaaatttttttgtagagatagggttttattgtgttgtttaggttggttttaaatttttgggtttaagcgattttttcgtttgggttatttaaagtgttgggattataggagtgagttatggcgtttggttttttttattttttagtagtttagtatttttttagtttttagtttttacgttttatttttttgatttatacgttttattttagattataggaggttgttttgtgataacgtgtttcgtacgttttgcgtgtttatagtaaggtattttatatatttgtgattaatgaagtaattatttgataaagtttgtttgttaggtattaattaaagttttaagagggtagcgaataatttttgttttttttatatttttagggttatattatggtaggcgtatattaagatttttgggtaaataggttgtaaaaggtcgggagcggtggtttatgtttgtaattttagtattttgggaggtttaggcgggtggattatttgaggttaggagttggagattagtttggttaatatagtgaaatttcgtttttattaaaaatataaaaaattagtcgggcgtggtggtgcgcgtttgtaattttagttattcgggaggttgaggtaggagaatcgtttgaattcgggaggcggaggttgtagtgaatcgagatcgcgttattgtattttagtttgggtaataagagcgaaatttcgttttagataaaataaataaataattggttaggcgcggtggattatgtttgtaattatagtattttgggaggtcgaggcgggcggattacgagattaggagttcgagattagtttgattaatatggggaaatttcgtttttattaaaaatataaaaattagttaggggtggtggcgggcgtttgtaattttagttattttggaggttgaggtagaagaatcgtttgaattcgggagacggaggttgtaatgagtcgagatcgcgttattgttttttaatttgggtaatagaacgagatttcgttttaaaataaataaataataaaaaaataaaaattaagttgtaaagattcgtttttttttttatatatttttttttttagatttaggagtttagtttttcgtttttcgtggtttttattatatttatttttttttttcgcgtattattgtttttagcgttagtcgtttatcgatgacgttttattttcgcgtcgttatagaggtaaagttattttttgattggttttcgttcgcgatgtttttggtcgtatttgaaataataattttattagtatttggtattaggcggagagaggcggtaagtcgcgaggaggaaagggatttacgtttcgttgtggatcgattttgttaagtagagaatcgttgtggtcggacgacggggcgtcgagataagaagaaagacgttggtaatttagaggattggttgcggcgttagataagaaagtaaggtttttaagtagggattcggggtggacgtgggggtgggtcgaagcgaagtcggaaataggaaattataatt

SEQ ID NO: 176 - DNA, 5252 bp, Artificial Sequence
  chemically treated genomic DNA (Homo sapiens)
agttgtagttttttgttttcggtttcgtttcggtttatttttacgtttatttcgaatttttgtttaaaggttttgtttttttgtttaacgtcgtaattagttttttgagttgttaacgtttttttttttgtttcgacgtttcgtcgttcggttatagcgattttttgtttagtaggatcggtttatagcgggacgtgagtttttttttttttcgcggtttatcgttttttttcgtttagtgttaggtgttaataaagttgttgttttaaatgcggttaggaatatcgcgagcggggattaattagagagtagttttgtttttataacggcgcgagagtgagacgttatcggtgagcgattaacgttagaaatagtggtgcgcggagaggagaggtgagtgtgatggagattacggggagcgggaggttgggtttttgggtttgggagaagaagtgtgtgaggaaaaaggcgggtttttatagtttggtttttgtttttttgttgtttgtttgttttgagacggagtttcgttttgttgtttaggttggagagtagtggcgcgatttcggtttattgtaattttcgtttttcgggtttaaacgatttttttgttttagtttttagagtagttgggattataggcgttcgttattatttttgattaatttttgtatttttagtagagacggggtttttttatgttggttaggttggtttcgaatttttgatttcgtgattcgttcgtttcggttttttaaagtgttgtgattataggtatgatttatcgcgtttggttagttgtttgtttgttttgtttgagacggagtttcgtttttgttgtttaggttggagtgtagtggcgcgatttcggtttattgtaattttcgtttttcggatttaagcgatttttttgttttagtttttcgagtagttgggattataggcgcgtattattacgttcggttagttttttgtatttttagtagagacggggttttattatgttggttaggttggtttttaatttttgattttagatgatttattcgtttgggttttttaaagtgttgggattataggtatgagttatcgttttcggttttttatagtttgtttatttaaaagttttaatatgcgtttattatggtgtggttttggggatgtggaaggagtaaaaattgttcgttatttttttagagttttggttgatgtttggtagataggttttattaaataattattttattaattataaatgtgtgaagtgttttattgtagatacgtagagcgtgcgggatacgttattataaagtaattttttgtagtttagagtggggcgtgtgggttagggaggtggaacgtgagagttgaaggttgaggagatgttgggttattaagaagtgaggagagttagacgttatggtttatttttgtaattttagtattttgggtggtttaggcgaaaggatcgtttgagtttaggagtttgagattagtttgagtaatatagtgagattttgtttttatagaaaaatttaaaaattagtcgggcgtgttggtgcgtgtttgttattttagttatcgggaggttgaggcgggagaatcgtttgagtttaggtgatcgaggttgtcgtgagttatgatggcgttattgtattgtagtttaggtgatagagtaagatatggttttaaaaaaaagaaaagaaaagaaaaaataaagtgaaggaaagggttattttagttataagggatttttgtataaagatttggaggcgggaagagatcgataatgtaattaatttaagtttttgttatttagaggtagaggaagtggggggtggtgaaagtaaagtagttttattgattaaatgttcgtagatgagaaatggttaagttaatgtttttagaagattattttaagttttagcgttggggagaggggtttaaaaaggggaattttgaatgggaggtatataggagtggtgttgggtataaggtatgtgtgttttgtttcgaaggttgttttgagttacgggttatttggagtatgggttggtgttaagttaataatggttacgttgtagattgatcgttttgaggtgatttttggagttttgtagttgggtttttatatttagtttgttttaagattagtttttgcggcgaggcgcggtggtttacgtttgtaattttaatagtttgggaggttaaggtgggtcgtttatttgaggttaagagtttaagattagtttggtttatatagtgaaattttgattttataaaaaaaaaaaaaaaaaattagttgggtatggtggtaggtgtttgtagttttagttatttaggaggttgaggtaggagaatcgtttgaatttaggaggtggaggttgtaagtgagttaagattgcgttattgtattttaatttgggtgttagagttagattttatttttaaaaaataaataaataaagattagtttttggaatttttaagtaagtatatagataagttagtagtgtaagatagtatttagtgggaaaggagggaaataaagaattttaaagtatgtttttaaggttaaaggtaagaaaggaataagaaagtttgtaaatgtatttggaatttatattatttggttttagtaagttttagtaaggtggcggttataggggtgtgttgcgttttgtataggtcggagttggagattcgttagtgaataaaataaattaaagtatttgttgtcgtggagtttgtatgttagtggggttgataaagaaggattaggttttttgggggagaattatcgtttagtaataaggagggattttgtcggggtaagtttttagggaacgttgttgtttttttttaggtttcgggatgtttttggtagatgagtttttagttgatttcgaagaggtagtagaagaggaggaaggaggaagttatggggaggaagaagaggagttagcgatcgaggatgtgtaggaggagatatagttggattttttcggggatttagttaagattatcgttaagttatgggatagtaagatggtaagaggataagaggtgtttttagtagggggttttagatagaattttttagaagggggtgatataggtttttttttgaagagtgttggattttgattgttttttttttttttatagtttgttgagattatgatgaagattgaggagtatattagtaagtaagttaaagttttagaaggtgtttttttttattttgtgtttttttttattttttgttttttttgttaggttttttggttttttggttgtttgtggttgggtatattttttttttagttttttttagagtttttttttttttttgttttattttaattcgtttttttttttattaaatatatattgtattgtaaagtttatgttttttaagttttttttgtgtgttgagtttattgattatgataggatttagtttgaggttttttagattttattgatttatatgatcggttatagggtttttgttatatttataagtcgtttattttattatttgtttaatatattttttgagtttaggatttttttttttaaatttatttgagaaggaagtaaattgttattatgaatggaaaattggtattatttggtaaagataaagttattgtataaaaatagatatataattatttaggaattatttaaggtcgggcgtcgtggtttacgtttgtaattttagtattttgggaggcggaggtaggtggattatgagtttaggagatcgagattattttggttaatacggtgatatttcgtttttattaaaaatataaaaaattagttaggcgtggtggcgggtgtttgtagttttagttatttaggaggttgaggcgggagaatggcgtgaatttgggaggcggagtttgtagtgagtcgagatcgtgttattgtattttagtttgggcgatagagtaagatttcgttttaaaaaaaaaaaaaataatttaaaatttttttttatgtttaaattgagagaatattagtttattttatgagtgtttagatttatttttaagagggtagttttgttattatttttatttttttttttttttttttgagatagagtttttttttgtcgtttaggttggagtgtagtgatgtgtttttggtttattgtaatttttatttttcgggtttaagcgattttttttttttagttttatgtatagttgggattataggtatgtaatattatgtttggttattttgtattttttagtagagatggggttttattatgttgattaggttagtttcgaatttttgattttaagtaattcgtttatttcggttttttaaagtgttgggattataggtatgagttattacgtttagtttttttattttttttgaatggaatttgttgatgataggaagttataggaggtttttggggaaagaagtgtagtgagagggtagagtttcgggagatttattgtttgttttttttaacgtttatttgggtatttagttgaatcgtttaggtttttgtttttaaagtatttaaggtttagtggaagaggtaggttaggttttagatagttattagtggtggtattaagttggggatatcggagttataggagggattggttgattttgttttaggtgttaggaagaatcgatagttgaattggattgtagagtatgaatgtatgtgttaggtaaagaaagggagaagggggtttagggaaagatagcggtaggttcggggttttagatattcggagagagaattttgtagagttttagatgttaggttaaggaatttttttttttagagggttatgggatatagaaagtgatattttttgatgttaggttaggtttagggatggagttagatttcgttatattcggtgtttggttgaggaggtagaggtgaaatattttataagttgtggtagtttttgtttattggaggtgtataagtgttgcgggtatatagaggaggcgtttgatttttttagaaagggagggaaggattttgagtcgttgtttgagttttaaggatttaaagagttatttgagtattagggttaggagtgtagattttgacgtcgttttgtttggtgttagatttgagttttgttttttattggttgtgatattaggtagttagtatttgtatgatttttaaatataatatttttttgtttgtttgttttttgagatagggttttattttgttatttagg

SEQ ID NO: 177 - DNA, 5285 bp, Artificial Sequence
  chemically treated genomic DNA (Homo sapiens)
gtcgagagttagtagtttagtttttcggcggttttgggtaagttttaataggatgttaggcgggttggtgagtaggaagagacgtcgtttataatttttttttgttgtaatttattaaatttatttggggtttttttgagacgttttttggaaatgttatattttaagggtttttttgttagaaaaggttagagtttacgtgggttttttatgttaaaggagtttgaaagaaaaggaaaggaaatgtatatttttagttttagttatgattaagtgggtttaggttatgagaatatttagatgatttatatgacgttatatgaagagttaattagtttaataattttcgaaaaatatttcgtttaagagtatttattagatatttggaatgtattaggttgttgttttaagttttttattagggtatagtggtttatttcgattgtattttaatagagtagggtaggtttgcgtatgatatttatttaatttatggggagattgaggtttagagagggttagtaatttgtttggggttttatagttagtaagtggtacggtagagatggaaatttaagattgtttaaatttaaagttggagtttatttgttttaataatttttaagttttgggagttttgatttagttttgtttttagtatttgattagtgtaagtttatttgcgtgaagatgaagttttattaaattattagttttggtttggtttggatgaatttagaagattttggggtttttttgtagttggttttggttttgaaatttttcggttatttttaggggggtaattatagtagattgtatttattattttgtggaagaattttagtgtttattatttgtgtatgtgatttgagttaatttttagaataggtggtttcgggtgggtttagtagagagatggtatatattgagatttgtttggtttaagggagagattttaggttttttttgttagtaaaggttttgggttttttatatagattattaagatgattttttaattttgttgatggttttttttatgtaatatgagttatttagaaagttagggttttatattagtgatagtttatttgttagtatttgtttgttaagattataaggtagataaggattttttttggaattttataatggaatattagagtgtgatagttaggatgtgggtttaggagttagattgtttgggttttaaattttgatatttttatttttaagttgtgagaatttaggtgattttatttttttgagttttagtttttttattagttaaatggggatacgagtttttatgttatagggttggtgtgatgattaaatgagataatgtgtgtgaagtttttgataggatgtttggtatatagtaattatttagtatatgaggttggtcgttgtgtagacgatggtgaaggaattagtgttgattagattagggatttttgtggggtcgtattaatttttggggaataaattagagtttttgtttttttttagttttttaaatttttttaagttatttaggtttatatgaaatttattttttttaggaagttattttgattattttagtttatattgattttattatatttgagttttttttgtttattatttgtatagattattttagtatttaaatcggttttaataattttttagttttttaaagtagttaatggtttttggaagttagatatttttagtttttttttttttatagtttaagttagggttaggtatatagtagatgattttttagtaagtttttagattgattttagtgtggttgtggatgtttgtgatttagttttttttttttttacgtttttttatagttttattttttttatttatttatttttttttttggttttagttagtagggtggggagttggagttatgattttataggatagttgtttttagattataaaatgtttaaagaaatttgagggtgggggagttaatagatggggaaaaaaatgttttttatgtttttttattaaataaagatatgaaaaaaaatatttgttttattattattttagtaaagaaaggatgtttttatattaataaagtagtaagggtataatttttgattaaaggttaatacgaagttggaaagttttaattttattgagaaaataaaataaaataaaaagaattttattgttgttgtgattttttttttttttttaaggattggagaatattttagtttttattgatttgtgtcggtggaatttatgggtttggggatagttattttggaggacgtttttgttgaattagggttttttataaatatatgaggatttttaaagttattgggttgggtagattcggatttttttttagttgttttagaggaggtttattttatgttagattttatttataattttaggagttgaggtggcggaggttttgaattttcgtttttgtatttttttttttcgggtagggtcgagttttttttttttcgttaattcggagtagatgaggcgagattgagcggtaagtttattttgggaagaggttggggagatttaatgggtagggttttttttatttttattattaagttgagtattcgtgtttatgttattttttagttttagtttggggaaaggaggaaaagtgggtattttagttcggaggtggcgggggaggggggtgtgggggttggtgttcgagatattcggttgggcgggtatagataggatttgaatatagggaagtatggtttagttttttgatttatagttagttacgttgggtttggattcggagggaggtacggttgtttttcggttcggttttgtatcgttgttaggggttttgtggggtttttagagggagaggcgtttaatattcggtttttttttaaatattttttattttaattgtttttagaagaggcgtgagcgtttatagtgaatttagtatagaaatttgttaggggagttgttgttgattgtatcgcgatttaaaggatcggcgttttttgtagatgtaggggttgagttaggttaagcgcgtcgtggaggttcgcgtggacgtagattcgggtgttatatagatgcgttggaatttaggtattttttcgcgtttcgtaaatttagatgttttagtttggatcgagcgagggttagagggttagttaggttagggttaattttagagttatgggttttttaaatgcgatttttagggttgagttgttgtggacgagcgatttatgtcggaatttcgcgtttacgtggttgtttaaagtttcgagttttcgggttgtaggttttagttacggaatcgagttgggagagttataggggttgggatttggaggatcggttgaggttcggtgtttttggttgtgttcgcggttcggagtcgtcgtttgattgaggggttcgttatagatgtgtgatgtataagttttgtacgtaataggagtttaataaatgtgcgaaggggggtatatttatgatcgtattgtatgtaggcggtttagaaggaagtttttgattggtatagggatggaggatggggtaagagtcgtaatagcgtcgcggagttttaacgttgtcggttttttggggtacgagtatagttttaagtagttttaagttttaggaagtttttagtttaaagtatagggcgtattggagtttgggtacgatatagtttatattacggttgcgatggtaagttacgtttaagttttaagggtttaggggattttcgttttttatagtcggaggagaaatttgggcgtagaaagtagggggaatatttggttgtaggtgagtaagcggggttaggagttttcgttagagtttttgcgtttcgggagaagggtgattatttttaggtttgttcgacgttttttttagggtgcgtttcggaagagcgagttttttaaggttatgtcgagtgggcgcgtttcggtttttttcgggagaggagaggcggggcggatttgtgtttcgttttcggttcggttcgtttttagtgttcgtttcgttttcggtattcggtcggcggcgtttttgatgtttcgattcgttagttcgcggagtcgttttgtttcgcgttttagttcgcgtttgtagttcgtttaggcggagttagttcgcgtttcgttcgtcgcgattcgggttcggaggttcggatttcgggttcgtcgtttttcgggtcggtttcgcgtttcgtattttcggcgtttagcgtttcgcgtttcggcgggcggagcgtattatgtcgtagttggatttcggcgggggcggcgcgggcggcggcgacgatttcggcgcgtcggacgagttgttggttttttaggatgaaggcgaggagtaggacgataagagtcgcgatagcgtcgtcggtttcgagcgcgatttggtcgagtttaagtcgtcgttcgtgaacgagttcgagggcgcggtcggcggcgtagggatttcgggggtttcgggggtcggcgtcggggttcgcggcgaggtcgaggtgagttttcgtcggcgtcggtttttttttcgcggtcgtcgcgtcgcgtcgttttagttgcgcgcggttttcggggtttttagcgcgtagagcgtttttgtttcggcgtcggtttcgattttcgcggttttatcgttttttattttttttcggttttttttttaggttttcgggcgggaatacgttgcgtagagatttttttcggataaatttttagagtttttggaggacggtgagtttttgttcggttcggttttttttcgtcgcgtttaggttttggtttcggtgggacggggacgttaaggatcgcggggagtcgggtgttttttttatcgtagtttaggaggcggtagaatttaggggtggagagtggggggcgggtttttcgggcgtcgtcgggtcgagttattttcggtgttttgatttttataggagtaaatagattttcgttattttcgtttttttttttgtttaggtgattgattaattcgtcgtttttaggagatagaattggttaaggttttttggttggagggcggggggtgggaggttaagtaggggttatttcggggaggtttgttttttaggttttttttttaaaatttggtattgtcgatatttttagttcgtttttttttaagttaggaatttgtaggggattttttggtaatttttttttttttaagagtagatagtttttagttttagtcgttgttagggttggtgtgtttgatttagttgtggtttttttagg

SEQ ID NO: 178 - DNA, 5285 bp, Artificial Sequence
  chemically treated genomic DNA (Homo sapiens)
tttggaaaaattatagttgggttagatatattagttttggtagcggttgggattgaaggttgtttgtttttgagagaaaaagaattgttaaggggttttttgtaagtttttgatttgggaaggaacgggttgggagtatcggtagtgttaagttttaggggaaggatttggagggtaggttttttcgaggtggtttttatttgattttttatttttcgttttttaattaagaaattttggttaattttgttttttgaaggcggcggattagttagttatttgggtaggaggggaggcggggatggcgggggtttgtttatttttataaaggttagggtatcggaagtgattcgattcggcggcgttcgggaagttcgttttttattttttatttttgggttttgtcgttttttgagttgcggtgggggaggtattcggtttttcgcggtttttggcgttttcgttttatcgaggttagggtttgagcgcgacgaagggaagtcgggtcgggtagaaatttatcgttttttaggggttttggaagtttgttcgggaagagtttttgcgtagcgtgttttcgttcgagagtttggagggagaatcggaggggagtgaggggcggtgggatcgcgggggtcggggtcgacgtcggggtagggacgttttgcgcgttggagatttcgagggtcgcgcgtaattggggcggcgcggcgcggcgatcgcgggggaggagtcggcgtcggcgggggtttatttcggtttcgtcgcgggtttcggcgtcggttttcgggattttcgggatttttgcgtcgtcggtcgcgttttcggattcgtttacgagcgacgatttgagttcggttaggtcgcgttcgggatcggcggcgttgtcgcggtttttgtcgttttgtttttcgtttttattttggaaggttagtagttcgttcggcgcgtcgaggtcgtcgtcgtcgttcgcgtcgttttcgtcggagtttagttgcggtatggtgcgtttcgttcgtcggggcgcggggcgttgggcgtcgggagtgcggggcgcggagtcggttcggggggcggcgagttcggagttcgaattttcgagttcggatcgcggcgggcggagcgcgggttgatttcgtttgggcgggttgtaggcgcgggttagggcgcggggtagagcggtttcgcgagttggcgggtcggaatattaaaggcgtcgtcggtcgagtgtcgggggcggggcgggtattgggggcgggtcgggtcgggggcgggatataggttcgtttcgttttttttttttcgggagaggtcgggacgcgtttattcggtatagttttaaagggttcgttttttcggagcgtattttgagagagacgtcggataagtttgggaatgattatttttttttcgaaacgtagagattttaacgggaatttttgatttcgtttatttatttataattagatattttttttgttttttgcgtttaggtttttttttcggttgtggagggcgggggttttttaggtttttgggatttgggcgtggtttattatcgtagtcgtggtgtgaattgtatcgtgtttaggttttaatgcgttttgtgttttgaattgggggttttttagggtttgaggttgtttgaggttgtgttcgtattttagggaatcggtagcgttggaatttcgcggcgttgttgcggtttttgttttattttttatttttgtgttaattagggatttttttttaggtcgtttgtatatagtgcgattataagtatattttttttcgtatatttattgagtttttgttgcgtgtagagtttatatattatatatttgtgacgggttttttagttaggcgacggtttcgagtcgcgaatatagttaagagtatcggattttagtcgattttttaagttttagtttttatgatttttttaattcggtttcgtgattagaatttgtagttcggagattcggaattttgggtagttacgtgggcgcgggatttcgatatgggtcgttcgtttatagtaatttaattttagaagtcgtatttagggagtttatgattttgaagttgattttggtttgattaattttttaattttcgttcgatttaggttgaaatatttagatttgcggagcgcgggaaagtgtttggattttagcgtatttgtatggtattcgggtttgcgtttacgcgggtttttacggcgcgtttggtttggtttagtttttgtatttataaaagacgtcggttttttggatcgcgatgtagttaatagtagtttttttagtaggtttttgtgttgggtttattgtagacgtttacgttttttttgagagtagttgggatagagggtatttgggggagggtcgggtattggacgtttttttttttgagggttttataggatttttggtagcggtgtaaagtcgggtcggaagatagtcgtgttttttttcgggtttaggtttagcgtggttggttgtggattaaagagttaggttatgtttttttgtgtttagattttatttgtgttcgtttagtcgggtgtttcggatattagtttttatatttttttttttcgttattttcgggttagggtgtttatttttttttttttttttaggttggggttggggggtggtatgggtacgagtgtttagtttggtgatggagatgagggggattttgtttattaggtttttttagtttttttttagggtgggtttgtcgtttagtttcgttttatttgtttcggattggcggggaagggggggttcggttttgttcggaggggagaggtatagggacgggagtttagagttttcgttattttaatttttgaggttataggtagggtttggtatagggtgagttttttttgggatagttgaaagggaattcggatttgtttaatttaatggttttaggggtttttatgtgtttgtagggaattttggtttagtaggaacgttttttagaatagttgtttttagatttatgagttttatcgatatagattagtggaggttgaagtgttttttagtttttggagaaaggagaaaagttataataatagtgaggttttttttgttttgttttgtttttttaataaggttaaaattttttagtttcgtattagtttttaattaaggattatgtttttattgttttattggtgtgaaaatattttttttttattaaaatggtggtgggataagtgtttttttttatgtttttatttggtgaaagaatataaggaatatttttttttttatttgttaatttttttatttttaagtttttttggatattttatagtttgggaataattgttttatggggttatagttttaattttttattttgttggttggaattagaggagagggtgggtgagtagggagagtgggattgtgaggaggcgtgagggagagaagggttgagttataggtatttatagttatattgaaattagtttgaaggtttgttaagggattatttattgtgtatttagttttggtttgggttgtggagagggaagggttagaggtgtttgatttttaggagttattggttgttttgagaagttgaagagttattagagtcgatttaggtgttagagtagtttatataggtaatggatagaaagagtttagatatggtgagattaatgtggattagagtagttagggtggttttttgaaggaggtagattttatgtgggtttggatggtttaggagggtttggaaagttggaaaggaataagagttttgatttgttttttagaagttggtgcggttttataggagtttttggtttagttagtattgatttttttattatcgtttatataacgattaattttatatattgagtgattattatgtgttaggtattttgttaagagttttatatatattattttatttaattattatattaattttgtgatatagggattcgtatttttatttgattaatgaggaaattgaagtttagagagatgaagttatttaagtttttatagtttgaaaatgaaggtgttagaatttgaaatttaggtagtttgatttttgagtttatattttaattattatattttagtgttttattataaaattttagagggagtttttatttgttttgtggttttggtagataaatgttgataaataagttgttattaatatggagttttgattttttgggtggtttatgttgtatgaagggggttattaataggattagggaattattttggtggtttgtatagggggtttaagatttttgttggtagagagggtttagaattttttttttgaattagatagattttagtgtgtattatttttttgttgagtttattcgaggttatttgttttgggaattggtttagattatatatatagatgatagatattggggtttttttatagggtagtgagtgtaatttgttgtggttgtttttttggaggtgatcggggagttttaggattaggattagttgtaaggaggttttaaagttttttggatttatttagattaggttagggttggtgatttaataaggttttatttttacgtaaatgagtttgtattagttagatgttggaaataggattaagttaggatttttaaggtttgagggttgttggagtagatgagttttagttttagatttgggtagttttaagtttttatttttgtcgtgttatttattagttgtgggattttaggtagattgttgattttttttgagttttagtttttttataggttaaatggatgttatacgtaggtttgttttgttttgttggagtgtagtcgagatgaattattgtattttagtgaagagtttagaatagtagtttggtgtattttaagtgtttaatgggtgtttttgaacgagatatttttcggaagttgttaggttaattggttttttatgtaacgttatgtaaattatttgaatgtttttatggtttgagtttatttaattatggttaaagttgaaaatatatatttttttttttttttttttaagtttttttaatatgaaaggtttacgtgaattttgattttttttgatagggagatttttgaaatgtggtatttttagaaaacgttttaaaggagttttagatggatttagtaaattatagtaaggagaggttgtgagcggcgtttttttttgtttattagttcgtttggtattttgttggggtttgtttaaagtcgtcgggaggttgggttgttggttttcggt

SEQ ID NO: 179 - DNA, 5518 bp, Artificial Sequence
  chemically treated genomic DNA (Homo sapiens)
tatattattatatttagttaattttttaattgtttgtagagatgaggttttgttgtgttgtttaggttggtttggaatttttgggtttaagcgatttttttattttggttttttaaagtgttgggtttataggtgtgagatattgtgtatggtttttttttttttttgttttttggaagtgaatataattttgagattttattgtttttataataaaatataaattgatatttaattaaatgtgcgaatagtgtttttttgatttgttgttttaatgttgttgtatatattgaggtaaagtttgttttggttttagtattgtatagaacgtatattaaatttacgatagttttgttttgtatagtttttggttattttagtatgttttatgtttattgtagtttttaggtgtgtgggaataggattgaagagaatggttgtgttttttttaatttttaaattttttttatacgtagtttcgtattgttatttatggtggagggtaatggcgtgattttagtttattgtaattttcgtttttttggtttaagcgatttttttgttttagttttttgagtagttgggattataggtgttcgttattacgtttagttaatttttgtatttttagtagagatagggttttattatgttggttaggttggtttttaatttttgattttatgatttgtttgtttttgttttttaaagtgttgggattataggcgtgagttatcgtatttagtttgttttttttttgttttgttttgttttgtttttaatttaaggttggatttttgataatagttttttattttaggataagggtaagggagatatttagaataaaataaggtatttaatatgatttagatgtttattgttaagaatgtttgtttttttttattagtttttgttgtttttgtttttttaagtaaaagtagattataggaatatttaatttaaataattgtgtttatttgagtttttttttgggagagttatgtattaagtttttagttttttgtttttgtatggttttggtagaggaggttggttagggatattatagaatgatgatattttagtaaaattttagtagtatgtgtatgatatgttgatagtttttgataggttttttttttttgggatgaaggtataataggaggttttgaatgaaattagaggaatttggttatgattaatatttgaatatttattttttagttataaacgtagtataggtagattttttataattttaggaggtattatttatattgtattttatgtaaataattttttttttttattttagaattgaattagtaagtaataggtttagaggtgtgaaaggattgttgtattgaattttttagtagtttgtaatgtattttttttttttattgtggtaaattataatattttaatgtgtttttttaaaataaagatttttatttaattgtgggtttttttggaatgttagcgagttatttggttaatggtattgaatataatattttaagtttttaagagttgattgtttttagaatggaaaatatttgatatgagagttgttatttttgagttaagtgtaatttaattttgtttggttgagtttgtatatcggttattgaaatgtaggtattttttttgagtttcgttagttgaagttaagattgaaatttggtaagtttattttatttggtaaaatttgttagaatagtttgattttattatttatttgtatatttttgtttatttggaatagttttagagtaaattattatatttttttgattttaagatttatgtatttttttttatattttaatatttttgaaattgttatttgtatattgtgttatatatattaaatgtatatagatgttttttaagacggggttgtatttggaaaattttattataagttgaaaatatcgtaagttgaaaatgtaagtttttttttttttgtaagttatttttgtttttttttgaaacggagtttcgttgtgttgtttaagttggagtatagtggtgtgatttcggtttattgtaatttttattttttggatttaagtgatttttttgttttagttttttaagtagttgggattataggggcgtgtttttatgtttagataatttttgtattttttgtagagatagggtttcgtcgtgttggttagattggtttcgaatttttgacgttaaagtgatttatttgtttcggttttttaaagtattgggattataggcgtgagttattgtgtttaatttgtaagttatttttgagttaacgatatttttaatttataatgggtgtatttagatgtaagttatcgtaaattaaggagtgtatcgaatgagtattaattttttttagtgataggttaattttggtaagttagggattatttgttttattaggttttttttttttttttataaagttaataaaattgttgtgtttttttgcgtttataatatttggtagttatatgttttgttttaaattttggaatattgatattgaaaaatagaagttttagttattttttaatgattttaaattataagtttttattaaattaaagtgaaattgtcgtttgatattttatttttttgttttaatttatatagtttttgatggttttggtttttttattaatagttgttaagagagaattagaaagaggtagttagtatttttgggaaacgttagagaagtatttgagaaaggggagtttttgttatttttttttcgaatagatttcgttaagtagggtttggttatatgagtattgttttttttttagaattttttgggcgtttgaggatttatttcgttttattttttatttttttttaatttttgtaattggaagtaagaggttttttagtattgttgttgtgaatattgagaaatttggttttgaaagttgttttagtattattgtaagtgttgtttagggatgttattaggggtgttaatgggaaattttaaataaagatattttttaggtgttgaattttgttatgttgtaagtgtgttttttagaggatatagttatatttattttggttatggaaggttgtggttggttttgtaataatttgtaataattgtattatttagattaagagggtttagattcgtgtgatttagaggagagagtaataattttagtaggttttgtagttttttattgtatttgtttttaagaatagaattaataaaagttttgaggtgagtagtgatgttaatgagagaaggaaagaagaaattagagaaagtaagttagttattgtgattgttttatttgtgggagagagttttaggaagtagatgatgtttatatttttttattggtttaggattttttaggaaatttgtttggggattgtaatttttattattatttagatgaattgttttgagtgttgggttgggtgttgattagagtgttttatttagtaggtggcgttttatataattttatgtttgaatttttttttttttgtttttttttttttggtagatttaaaatggatgggtattatggttttgataggagtttggaggatttatatttagaagagatgaaagtttttgattggatttttagtattgtagattgaatacgtttatttaggattgtatgtgaaataggggagggagtaaaatttaagaatttgattttatggtgttgatatgatttaatttggatatagtttagtttaaaaatgttttttttgatattgggatagttggtaaaaatttgaataaggtttgtagattagaaatagtattgtattagtattaatattttgattttgattattgtttttaggatatatatattgaagtgtttaggagtattgtgtttgtatggttagggaaaaaatatttttatatttgtttatatattgttatatagaaagaagatgaagtaaatgtgaaatattagtatttaggaaatttgggtgaaggttgtataggaattttttgtattgttttaatttttttgtaggaaaggttttgaaattgttaaaaaaatattttttaaaaaatttttttttttgtataaattttttttttatggaggtaggaatttttttttttttaaaattgtgagttttttttagtttagtttttaaatgtgttaggttaagaaaatttgatacgtatatatttaaaatgtaagttttaatgttagatttagttttatagtttttgtttgttttgttaagattagttaaagttttgttttttatttttgaggtgttgttagtgagataatttttttttttttttttttttttgagatggatttttgttttgttgtttaggttggagtgtagtggcgtgttttggtttattgtagtttttgttttttaggtttaagtaatttttttgttttaggtttttgagtagttgggattataggtgtgtgttaatatatttagttaatttttgtatttttagtagagatagggttttattatgttggttaggttggtttcgaatttttgattttaggtgattcgtttattttagttttttagaagtgttgggattataggttttagtgagttattatgtttagttaagggaattttttagtattttgaaataatgatataaaattgttttatgtgttaatgtttaggtttttttaattagattgttaattgagaattttttttataaatttattgttttttaaagtggtaaattatttgaaagaatagaaattagatgatagtaataaaatagtttgagggagaagaagatgtatttaatttttttgtcgtttttaagatggttgattatgattgtaaatatattgtaggatatataaaaataaaaatggttgtgttagggttgtagaattttaggtaagtttttatttttttgaatttatatgttgtttttttttttttttataagttgttcgtgtgattttgtatgatttaatgattttaatttttttttattttgtagagtggagattgttgtacggattttggaattatgaatatatttgatcgaaagattaattttgatgcgtttttaaaatttttttatatgtaagtgttttgattttgattggttttgtattgtatttttttttatatttttttgttttttttttgtatttataatttttgtgtgtataagttaataaattaatttggttagaatttagaggatttgatgaaaatgtttagattttatacgttgttgtgtggttattggaaaggtatttattttagtttgggtattgattatttataattttgggtatttggttttttttagtatttaaggttttgttaatttatttttaaaatattattttttattgtaatatgtttttttaaaagtattttaaattatttgtaatagaatttttatatatttttaggaagggaaagagagaaatgattttttttagtttaaatatgagattgatttgggattgattgtttttatttatattttttttttaga

SEQ ID NO: 180 - DNA, 5518 bp, Artificial Sequence
  chemically treated genomic DNA (Homo sapiens)
tttaagaaaagaatgtgaataagagtaattagttttagattaattttatatttaagttaagaagaattatttttttttttttttttttgggaatatgtaaaagttttgttataaatagtttgaaatatttttaggaaagtatattataataaaaaataatattttgaaaataggttaatagaattttaaatgttgaggaagattaaatgtttaaaattatgaataattagtatttaaattagaataaatgtttttttaataattatatagtaacgtgtagaatttggatatttttattaggttttttggattttggttaagttaatttgttagtttatatatataaaagttataaatgtagaaaagggataaagagatatgaaaagaaatgtagtataaaattagttaaggttaaaatatttatatatgagaaaattttaaaagcgtattaaagttgatttttcgattaaatatgtttatggttttagagttcgtgtagtagtttttattttgtagaataaagaaaggttagagttattaagttatatagaattatacgaatagtttataaaaaaaaaaaaaagtaatatgtaagtttagaaagatgaaaatttgtttaaaattttatagttttaatataattatttttatttttatgtgttttataatatatttgtaattatagttaattattttaaagacgatagaggaattgaatgtattttttttttttttaaattattttgttattattatttgatttttatttttttaggtgatttgttattttaaaaggtagtaagtttataaaagaaatttttaattaataatttagttaaaggaatttagatattggtatataaagtaattttatgttattgttttaagatgttaaagaatttttttggttgggtatagtggtttattgaggtttataattttagtatttttgagaggttgaggtgggcggattatttgaggttaggagttcgagattagtttggttaatatggtgaaattttgtttttattaaaaatataaaaattagttgggtgtgttggtatatatttgtaattttagttatttaggagtttaagatagaagaattgtttgaatttgggaggtagaggttgtagtgagttaagatacgttattgtattttagtttgggtaatagggtaagagtttattttaaaaaaaaaaaaaaaaaaaaaaattattttattagtagtattttaaagataaaaaataaaattttgattagttttaataaaataaataaaaattataaagttgggtttggtattaagatttgtattttaaatatatgcgtattaaatttttttaatttaatatatttaagaattgaattgaaaaggatttataattttaaaaaaagagaggtttttatttttataaaaaaggaatttatgtagaaaggaggattttttggggggtatttttttgatagttttagaattttttttatagaaaggttagaatagtataaagaatttttgtataatttttatttagattttttaaatgttaatattttatatttgttttattttttttttatatagtaatatatagatagatgtaaaaatattttttttttaattatatagatatagtgtttttaaatattttagtgtgtatattttgaaagtaatgattaaaattaggatattaatattaatgtaatattatttttaatttgtagattttatttagatttttgttaattgttttaatgttaaaaagggtatttttaaattgaattatatttaggttagattatattaatattataaagttaagtttttaagttttgtttttttttttattttatatgtaattttaagtaaacgtgtttaatttatagtattaaagatttagttaagaatttttattttttttaaatataaattttttaaatttttattagggttataatgtttatttattttaaatttattagaaaaggaggggtagggaggaagggatttaaatataaagttgtgtgaaacgttatttattgaatgaagtattttaattagtatttagtttaatatttagaataatttatttaggtaataataaaagttatagtttttaaataaattttttaaggaattttgggttagtggaaagatataaatattatttgttttttgaggtttttttttataaatgaaataattataatggttggtttgttttttttggtttttttttttttttttttattaatattattatttattttagaatttttgttaattttgtttttaaggatagatatagtgagaagttgtagaatttattaaggttgttgtttttttttttgagttatacggatttgggtttttttgatttagatggtgtaattattgtaggttgttataaggttaattatagttttttataattaagatgaatatgattatgttttttagagagtatatttatagtatggtagaatttagtatttggaaagtgtttttgtttaaggttttttattaatatttttaatgatatttttagatagtatttataataatattgaagtaatttttagagttaagttttttagtatttataatagtaatgttaaagaattttttgtttttaattataagaattaaagaaaggtaagggatggagcggggtggatttttaaacgtttaggggattttaagaaagaggtaatgtttatgtaattagattttgtttggcggaatttgttcgaggggagaatggtagaaattttttttttttagatatttttttgacgttttttaggggtattgattgtttttttttggtttttttttaataattgttgatggaaaaattaaaattattaaaggttgtgtgggttggggtagggggatgagatgttaaacggtaattttattttgatttaatagaagtttgtggtttgaaattattaaaaaataattaaaatttttgttttttaatattagtattttaaaatttaaaataaaatatgtaattattaaatattatagacgtaaaagggtatagtaattttattagttttatggagaaaaaaaagaaatttggtaaagtagatggtttttgatttattagggttgatttattattgggagaaattgatatttattcggtatattttttgatttgcgatggtttatatttggatatatttattgtaaattaaaaatatcgttgatttaaaaatgatttataggttgggtatagtggtttacgtttgtaattttagtattttgggaggtcgaggtaggtggattattttgacgttaggagttcgagattagtttggttaatacggcgaaattttgtttttataaaaaatataaaaattatttgggtatagaggtacgtttttgtagttttagttatttgggaggttgaggtaggagaattatttgaatttaggaggtggaggttgtagtaagtcgagattatattattgtattttagtttgggtaatatagcgagatttcgttttaaaaaaaaataaaaatgatttataaaaagaaaaggatttatatttttaatttacggtatttttaatttatgatggggttttttagatgtagtttcgttttgaggagtatttgtatatatttaatgtatatgatataatgtatagatgataattttagaaatgttaaaatgtgagagggaatatataggttttagaattaaagaaatatgatagtttgttttagagttgttttaaatagataagaatatatagataagtaatgagattaaattgttttgataagttttgttagataaaataaatttattaagttttaattttagttttaattagcgaagtttagaaaagatatttatattttaatggtcgatatgtaaatttagttaaataagattaagttgtatttaatttaaaaatagtagtttttatattaagtattttttattttaggagtaattagtttttaagagtttgaagtattatatttagtattattaattaagtaattcgttaatattttagaggagtttatagttaaatgaaaatttttgttttaaaaaaatatattaaaatgttatagtttattataataaagaaaaaaagtatattataagttgttaaaaaatttaatatagtagtttttttatatttttaagtttattatttattaatttaattttaaaataaagaggaggggttatttatatagaatataatgtggatagtgttttttggagttgtggaaaatttgtttatattgcgtttgtaattgaaaagtaaatgtttaggtgttaattataattaaatttttttaattttatttagagttttttgttatgtttttattttaggagaggaaaatttgttagaagttgttaatatgttatgtatatattgttaaagttttgttgaagtgttattattttgtggtatttttgattagttttttttgttagagttatgtaaaaataaaaagttaagagtttaatatatagtttttttaagaaaaaatttaagtaaatataattgtttgagttagatatttttgtggtttgtttttgtttgggaagatagggatagtaggggttggtaggaggagataggtatttttagtagtggatatttaggttatgttaaatgttttgttttgttttaggtattttttttatttttgttttaaaatgaaagattattattaagggtttagttttaaattaaaaataaaataaaataaaataaaaaaaaaataggttgggtgcggtggtttacgtttgtaattttagtattttgggaggtaaaggtaagtagattatgaggttaggagttggagattagtttggttaatatggtgaaattttgtttttattaaaaatataaaaattagttgggcgtgatggcgggtatttatagttttagttatttaggaggttgaggtaggagaatcgtttgagttagggaagcggaggttgtagtgaattgagattacgttattgttttttattatgggtgatagtgcgagattacgtgtaaaaaaaatttaaaaattaaaaaaaatataattattttttttagttttatttttatatatttaggagttatagtgaatatgaaatatgttgaagtagttaaaagttatgtaaaataaaattatcgtggatttagtatgcgttttatgtaatgttggagttaagatagattttgttttagtgtgtatagtaatattaaaatagtaagttaaagaaatattgttcgtatatttaattaaatattagtttatgttttattatgaagataataaagttttaaggttatgtttatttttaaaaaataaaaaaggaaaaaggttatgtataatgttttatatttgtgagtttagtattttgggaagttaaggtgggagggtcgtttgagtttaggagttttagattaatttgggtaatatagtaaaattttatttttgtaaataattaaaaaattagttgggtgtggtggtgtg

SEQ ID NO: 181 - DNA, 9515 bp, Artificial Sequence
  chemically treated genomic DNA (Homo sapiens)
agtatttttattttttaagattttttttttttaaagtaataatatggaaaatatttataatgatgaaagtatttgtttttttgtattagttatggtagaggagatatatattttttatattttgaatgtgaaatgtttattggtgttgaaaataattgttgtatggttgtttgtattatttgttttagttttttatttttttttttttaatttttttatttttaagagataggaattttaaaattgtttttttagttattttatattttcgtagttaaatagaaaagtttaaggggattaggatatttaaaatttataatgaaattattattgttttttaaaagttttagggaaagggtgagtttttatagttatagttatttttatttttataagtgattttaatttagtattttttataaatttataaatgtattattaattaaatattatgattaaagtaagaaatgtttttttttgtttagtgtttgttttaatttcgataattatgaagagttagtttaaagataattttatttatattttattttttaaaaatatttttgtgtaaatattagttttttttattttgtttttttatattaagttattgaaatttatatggtattaaagttttagaaatttgaaggtaggtgtttaaattgtagttttagatatttaatagtattttgtttttaaattgatgataaaaatatttattgaattttttttaaaaatataattatgagaaagtttaagatagaaatatggtaggaaaattaggagttagattgtaatagtaaaaaatggagttgttatgttttattattttttaatttattaagatttgttatatggatgtcgtgttttattatttaatttagtagataataatgtttttgatgggtaagaggtggggtaatatttgaggatgttgaagtaagatagttttttttttttttttttttttttttgtttatttataaatttaggattataaaaaataattttggatatatttaatgatttaaaaatattgtttttttaattttagaaggaaagaagtaagatagtattatgagattgtgggtaaagcgttgagtatatagtttgaagatttatattgggttttttatttttattttttaattaggagtttattgtaaatttttggtttttagaagtttttatttttttgatttttcgttaagtgttttgagataatgatgataagttaaattgtttatgaagtaatagtattatatatatttatttatagatattattttaataaatttttataattatttttattttgtagtttagtgtattgaattttaggttattaaatagtttgttttatcgtttagaatgagaaaggttagggtgtaaatttggtataataattttaatttttgatttttttaattttattatttttgtgcgttgggtagatggaaaggggaaatttagggagattgtgtaatggaaaaagaaaaggtggtatagtgggtatttgtaaaggaagatagtttatggagtgttaatttataggtgtaaaggtgagggttagtggaaggaaggaagttaaataaatttagataatttataattagatttttagaagaaagatgaaagaagatatgaaagtgtttttagttgattttgatttaataatgatatttttttgtatattttttaaaaaatagttttgaatatatttcgaaaattattagtagagggttttatgttgggtgtatttgtttttaattatagatttcgatatttattgaataatattttttttatatgaggttgaaaaaaaaagagggtatgaataatttttttttttgttgttttaaattgaaataaatgtaaatgaaagaggaaagtacgagtgttaattatttgggatgttttaagtgcggttttatttaggagagtatgtgcgtaatttgaaaaagaaatatggatataaggtaagataaaataacgaggaaaatgtatattttattcgtttaattttttttaaatttagagtttgttttgtttttgtgtttttatttattgagtttttgcgggaatagtttttttacgttatgtgattgagtgataacgcgaaaggtaatagaaagtaaaagtaagagaggtaggtttaagttaggaaaaatttttttcgtagcggttgagtttttattgtgcgttttttcgggcgtttgaattttttagatgttggaacgatcgtttttaaaattagtaaatattataagaagtgaattttaaaaatgttttttttaatattaggtttttaagaacggaaagaaatttttgtcgaaaaagaaattaaggagatttgtagggtttgcgtttataaaatttcgatagagggcgttgttgttcgtttaatgatagggaacggttcgtgggaacggtttattttgtaatgtttaggatttttcgaataacgtttacgttaaaaaaaataattaggattttaattatggttatgtattttgaaggtatttttttatatatatgtgtatatttttaggtttatgttttatttttaataaaattagatttgttattttttaggttttttaaagaatttaaattttaattaaatattttaagatatttttattttaaaaaatatttaatattagtataaaataaaattatatataaaaagtttgaaattatttatatataaggttataaaatagttatattaatataatattttatattattttaatttatgtgtaaaattattttttgtaggttttgttttgttaaattttagagtttatttattttagattaggtaataatatattaaaaagatattaaaaggtgttaaaagtatttagagaaaaaaagtgagatttttttaaatgtattttatttgggttgtaatgatttttaggtaataataatgatagaattattgatttgaaagggagaaaataattatttttattaattaaatgttttgtgtttggagaatttgaatttttaagtttataatatttattttttagattattgatttggtattgattttagttttagaagttagggggtgtggaattcgttttaagttttattatataataagattaagaaaaatttttttttattttttaattagttttggaagtaaagaagaaaatttttgttgatgtttttagtgaaaaatttgtatagattgtgtatgatttaaggttaatatttaaaggggaagaaaggaatggagagagaaaggaaggaacgaaaagggaaatgaaggaaagaaaaaaggaaaataaaaaggaggaagaggagaaaaggaaagacgaaatataaaaaatttaatcggaaataaggggtttatttttgaagttttttttgaagtattttttttgtgttttttttttttgatttatttttaaaaattaaattaaaaatttgtagaattgtttattttgtagtttatgaagtttttttttggttttgattgaatcgacgtttaataaggttgttcggagttttgtatttaaatagcgtttatttttgttcgcgtagagttgtatatagtagttttggatttaaagataattattttttgtagatttatttttattaggtttaataatttttattttaaattgttttattttttttcggttttttttggtattttttttttgttttaggcgtagagatttttttttgggcgtttgtttcggttatgagaagtttttcgtattttgaaagggagtagaaaaatagaggggatgggaaagggggaataggggaatagatgagtatttattttatgataaaatttagaatttttgcgttttaaatggtgtttattttttaagtttggttaatattgtttttgttgttgatgatgtttttttttttaaaaattatatgaattattttattaagaaaaattatataaaaaaaagaagaaattttatatgtattaaaatattttttattatttttttgaagatattttgtttaaatttttttaaagattcgggtggtttttttttgattttttatgattaaaattatttataagttatatataatagatgtaaatataaaatgtttttggtttttgtaaaaaaggtttaaaattaattttgtttgaacgtgtgcgtacgttgtttttaatatttgaaaaaaatttgataaaatggagattttagttaagaggaatggtgtatggaattcgttgaaaatgtatataaataatatttaaaataataagtagtataaattgaggtgtatttaagtttttaaaggttttaggtaaaatgattagaaaatattagaaatggttattaacggtggttagtttttttgttttatggtgatagagataaagttaaaaaaaaaaaagttgtgtagttattaatatagagatagtttttaaaattttttatatttagttttttaaaatattttttttcggaatatatatgaataggagggagtttttgtgtttaaaaattttggtaagtgtttttttttaaaatttatatagaaaataggggattgatggtttttggttttttattatgaattgtaaagattttagttagtggttataatgatgtgttattttcgatatagaagttataaaatgtatatattatattaattattttgaataattttttgttaaatgtatatttggagtttgtagattgtgtgatttagaggtgtttatataattatatgtgggtgtttgggtgtaaatacgggtttatgatttttatagtatatatgtttgtgggttgtatttaatttttgtgtgtgtaataatgttttttttttttgttgaggtttatttgtttagtttattgtttgagataatagatataagttgcgatgggagaggagcgtcggatttggtgtgtattttttatttttaattatagatggattattatagatagcggagttttgagaagttagatatttgttttttatatgaatgtatttattttttagagattaggttgttattatgttttggaagtttgtggagaatgttaagtacgaagatatttatgaggtgagtcgatatttttagatgtattttagagttttgtagatagagaatttgagttttttgatattttaaatgatatatatttttaagttatttattcgtagattttcggtcggtttttttagttttttttaatttttagaaaagttggttagggaagatttcgttgttttgaaaagggattttaaggttgaaatttgataattttaatttaggaatgtttttatttattttatttttttttttttttttttcgtttttttttattttattttatttttttaagttttgatggggaatgtggtgttattgaatgtgggtacgtttttagagaaaatcgagattttgataaagttaggggtttttttcgttttaagtgtggaagagaattgggtttttaagttttatttgtaatagattcgggtttttaatttttatttttaataaaatttttgaaattgataataaatggttttaagtagaggatagagaattagcgggaaagaagtagatggttggagatatggatggatagagtaaaatagaagtcgtagtagtttattagtttttgtttttttgtgttttgtttttttgagggttattgcgttcgaatagaaatcgtagtcgttttttgtgtgggtattttttacggaaatttttgtttacgtttaatgcgtacgggtttttagtattgaggttagtttaatttttcggggtaggagaagttgcgtttagttaggaggacgttagtcgttttcggggttcggatcgcgttcgttaaagttttttttcggttcgggcgagggttgacgcggttagacggtttcgttattcgcgggcgaggcggattaggcggacgaggcggtcgaggcgggcgaggtgggagaggcgggcgaggtgggagaggcggtcgaggcgggcgaggcgcggggcgcgcggcgggttaggttggggatcgggaagttcgcggagtttcgtttttaagcggaatggtttgggatagttttaggtggttgttaggggaagggaggaagggaaggttttgttgagacgtcgaggttggaaataaaaatttcggaaaggcgaagcggatttagaaaaggagggaagtcgaggcgggcgaagcgggttatggagattgttaagaggaaaagttggagagaaaaggaaggaagagaagtagattttcgggtggcgggcgcgggtcgttaggttagacgaaaggtggagggatgtagaggttttttaaagagtcgagaaagatacgcgattttttcggatcgggatagtttttgaaagttcggcgtagagtcgtttcgaagattttaagagtgggcgatttataggcgcggtcggtaagtttttgggggattcgggttcggacgagcgtttataggtagcgtttggcgtttatattttttgttttttttcgaattttaatgttggggtgtgtgtatgtgtggaggtatgtaggagagaggaggaggagataagagaggagagggagaaaagtaggagagagcgcgagagagtagagaggagagagattggttttgttgttgaatgatgtttggggttttttttttttttttgtggttgtgtatcgattgtaacgaagagtcgcgtttacgcgtttggtggggattgtttcggttcggtttttttttttttttttaataggcgggataatggtaaagtttaaggcgttagaattgttttaaagaatattagcgtttaaagtgggtatgatattagtaagtacggggttatggtgaaaatagtttaagttatatgtatgtagaggtattttagtgggttttaaaaagtaattagggtaatattcgttttttatagaaagtaaagtagttaaatggaaaaggaaggagggagagaagaaaggagggagggagagaggaagagggaggggtggagtggaagggagggaagagagaagagaaaagaggggagggagagagagaaagagaaataaatagggagagagagggaatattataggtggttttatttgtttaaattttttgtttaaaaaatagaattcgtagttcggtggaaggagtttatttaagtttggattaaggttgaattttaatagaaatggtagttaggttagttgaacgggtttttgaaatatttaaaaaggttttttgttgtttttggttttgtttggaaaggataagtttagtgtatttgaagattgatggcgtatgttttaaattgaggtaaaaatcgtaaattatgtgagtattaaataggaaaaggttgtataggaatgaaaagtttttatttcgtttttgttttttaataaatgagtataattttttatatttagtaaaagtttgtaaaagttattgtaaataattaggtttattaatttgtttttttttcgtttttaaatgatgaagtaattttttttattttgtttttgtaatttttatataaagtatttaaggcgattaagtttttcggattagggaagtttttttttaggtaggaggatatttttattttatataattttttagtattgtttttttttattgttttatttaaaggagtaggggttgttttattcgtgttttcggtatagttaattgaagttttgttttttttttgttaaattttttttttagtttgtttttgttagttttttcgtttgattatatttagtaattttttattgaatgaacgttatttataatagtaggggagttttgcgttcgttgttgttttacgttttatttgttttttattttttttttaaagtattcgtgtaatattaatagttatgaatattaattattatgaggcggtgtaggtaagcggagggaggaaggggcggtcgagtagtttgagtttagtttcgggtgaaagaggattgtatttggagtttcgaagaacggtagaagaaaagaggttaaaaagatagtaaagagatagatgaatagttttgtttgtgtgtgataggtatcgttaattttgttggggtggggggcgggtgtaattttttttttttttttttgatggtttgttttggaaatatattaagtttagtttttgtgtttagttcgtttttttgttggattttttgattttttttttaattattgtttgattttgagtagtaattaggtttttttttttagatgttagtttatatttatttatttatggtgagtttggatttacgtgttattagaattgtatgttttttttttttattgtttttttgtttttgcgtttttgtgtgtgtgtgtgttttatattttttgtttttttttgtttttttttgagcgtttttggtttggtaatttagtattataattggacgaggttgtagttgtttttttttgtattgtgtgtttttcgtttgagttttatgagttagttgggaggggagaggtcgaaaagaaaaattttttatttgttattgttgtttggaaatttaggtgattatttttgtaaaaagaattatggggagtttattatgatgtttttagagaagagagggagaaataaagtttattttttttatatatatattttttttttttttttttatttagtttatattttagataggattaggaataagttgtttgggtttttatttttttttattttaattttagtttttttatttttatattttgagtataatagtattagatatagaaaaatagttttagaaataatttttatgaattataatttaatttaatttattattggtttaggatatgatttcgaatgagatttattttaatgaaatattatttaagttatttaattttttttggagagggaggagtgattgggaatttagattaggtggattttttggagtttttggaatgattaggttgtgtggaaagttttttttaattagttagttgtatttttagcgaaggtagaagttggtttttaattagggggagtagtatagtaaatattatgaagttttatttgttgtgatttgtatttttggaagagttagaaaaaagtagttaaaaatatttagaggagtaaatattatatgtaagatttttataattttaattaaggtatttagaatttttttttatatatattgtttttgtatttttgttttttgtttgttttgtattttttaaaaagcggttaaaatgttatagttaagtgggtgattttttttttattttttttttaagtttggggtttgaaattgttgaaattatgtggttttttgagttaatttgggggtttaagttttagatttttgttttttttgtttcgggaagagcgtataaaagtcgggtttttttatttgttatttgtattttttttttttttttttgtattttttgtttttttttgtttttatttttttttttttgtttttttttttggtttttttttttttttttttttcgtttttagg

SEQ ID NO: 182 - DNA, 9515 bp, Artificial Sequence
  chemically treated genomic DNA (Homo sapiens)
tttgggagcggagagaggaaggggaagagagttagagaaggagatagagaaagagagatagaggtagagagagatagagagtatagagaggaagaaaaaaaatataagtgataaatggagaagttcggtttttgtacgtttttttcgggataagggaagtaaggatttgaaatttagatttttaagttgatttagagggttatatgattttagtaattttaaattttaggtttggggagaaaatgggaaaggaattatttatttaattataatattttagtcgttttttggggagtgtaaagtaggtaaaaggtaggggtataggaatagtgtgtatggagggagattttaaatgttttaattaaaattgtaggagttttatatatggtgtttgtttttttgggtgtttttaattatttttttttaatttttttagaggtataaattataataaataaaattttatagtatttgttgtgttgttttttttgattaaaaattaatttttgttttcgttggaaatgtagttggttgattaggaggagttttttatataatttgattattttaagagttttaaggaatttatttggtttgagtttttagttatttttttttttttaggagaaattaaataatttaaatagtgttttattgaaatggattttattcgaaattatattttaagttaatgatgaattaagttgagttgtggtttataggagttatttttaagattgtttttttatatttaatgttgttatatttaggatgtgaaaatgaaggaattaaagttggggtggggggaaataaaagtttagataatttatttttggttttatttggagtgtgaattaagtgaaagaagaagggggaggtgtgtatatgagggaggtggattttgttttttttttttttttttggaaatattatggtaaattttttatggttttttttgtagaaatagttatttaaatttttaaatagtaatggtaaataaaaagttttttttttcggtttttttttttttagttgatttatggagtttagacggagaatatataatgtagagagaagtagttgtagtttcgtttaattatggtgttaaattattaagttaaaggcgtttaaaggaagatagagagagatagagagtgtgagatatatatatatatagagacgtagagatagagagatagtgagaggagggagtatgtaattttggtaatacgtgaatttaaatttattatggatgaataggtgtggattaatatttggaaaaaaaagtttggttattgtttaaaattaaataatgattaaaaaaaaaattaaggagtttagtagagaagcgagttggatataggagttgagtttgatgtgtttttaggataagttattaaaaaaaaaaaaaaaaaattatattcgttttttattttaataagattggcgatgtttgttatatatagatagaattatttatttgtttttttgttgtttttttggtttttttttttttgtcgtttttcggggttttagatgtagtttttttttattcgaagttgggtttagattgttcggtcgttttttttttttttcgtttgtttatatcgttttataataattgatatttatgattattaatattatacgagtattttaaagggagaatagaggataaatggagcgtgaagtagtagcgagcgtagagtttttttattattgtaaatgacgtttatttagtggagaattattagatgtaattagacgagggggttggtaaaggtagattggggaaaaagtttagtaggaaagaggtagaattttaattaattgtgtcggggatacgagtaaagtagtttttgtttttttggataaggtagtgagggagaatagtgttgggaggttgtatagaatggaggtgtttttttatttggagagagatttttttaattcggaggatttggtcgttttgggtgttttgtgtgaggattataaaaataaaataaaaagggttgttttattatttggaggcgagagaaaggtaaattggtgggtttggttatttatagtgatttttgtagatttttgttaaatgtggaagattatgtttatttgttaaaggatagaagcgagatggaggttttttatttttgtgtagtttttttttgtttagtgtttatatagtttgcgatttttattttaatttaaaatatacgttattaatttttaaatatattaaatttattttttttaggtaaagttaggggtaatagaaaatttttttggatgttttaggaattcgtttaattggtttgattgttatttttgttaaagtttaattttagtttagatttaaataggttttttttatcgagttgcggattttgttttttgagtagaaaatttaggtagataggattatttgtaatattttttttttttttttgtttattttttttttttttttttttttttttttttttttttttttttttttttttttttattttatttttttttttttttttttttttttttttttttttttttttttttttttttttttatttagttattttattttttgtaaagaacgaatgttattttggttattttttagaatttattgaaatgtttttgtatgtatatagtttgagttgtttttattatggtttcgtgtttgttaatgttatgtttattttgggcgttaatattttttaggatagttttagcgttttggattttattattatttcgtttgttaaggaaagaaaaggaggtcgaatcgaaataatttttattaggcgcgtaggcgcggtttttcgttatagtcgatatataattataaagagaaaaggaaaattttaagtattatttagtaataagattaattttttttttttttgttttttcgcgtttttttttgtttttttttttttttttttttatttttttttttttttttttatatatttttatatatatatatattttaatattaggattcgggggggggtaggaggtgtgggcgttaggcgttgtttgtgggcgttcgttcgagttcgagttttttaggagtttgtcggtcgcgtttgtgagtcgtttatttttaggattttcgaggcggttttgcgtcgggtttttaggagttgtttcgattcggaggggtcgcgtgtttttttcggttttttggggagtttttgtatttttttatttttcgtttgatttagcggttcgcgttcgttattcgggagtttgttttttttttttttttttttttttaatttttttttttagtaatttttatggttcgtttcgttcgtttcgatttttttttttttttaaattcgtttcgttttttcgaagtttttatttttaatttcgacgttttagtagaattttttttttttttttttttttggtaattatttggggttgttttagattatttcgtttaaaagcgaggtttcgcgggtttttcggtttttagtttggttcgtcgcgcgtttcgcgtttcgttcgtttcggtcgttttttttatttcgttcgttttttttatttcgttcgtttcggtcgtttcgttcgtttagttcgtttcgttcgcgagtagcggagtcgtttggtcgcgttagttttcgttcgagtcggaaaagggttttggcgagcgcggttcgggtttcggaggcggttggcgtttttttggttgggcgtaattttttttgtttcgaagagttgagttagttttagtgttagagattcgtacgtattgaacgtgggtagaaattttcgtgaaagatgtttatataggaggcggttgcgatttttgttcggacgtagtgatttttaaggaagtaaaatataagaaaatagaaattaataaattgttacgatttttattttgttttatttatttatatttttagttatttatttttttttcgttaattttttgttttttatttggaattatttgttattaattttagaaattttattgaaaataaaaattaaaagttcgagtttgttataaatgaggtttgaaaatttaatttttttttatatttaaaacgagaaaagtttttgattttattagaatttcgattttttttgagagcgtgtttatatttagtagtattatattttttattagagtttaaaagggtggggtggggtggggggaggcgaggaaaagggaaagaaaaataaaataaataaaaatatttttaaattaaagttgttagattttagttttaaagtttttttttagagtagcgaagttttttttagttagtttttttaaaagttaaaaaaagttgagaaaatcgatcggaaatttacgagtaaatagtttaaaaatatatattatttggggtattaagaagtttaaattttttatttgtaaagttttaaggtgtatttgggggtgtcgatttattttatagatattttcgtatttgatattttttataagtttttagagtatgatggtagtttggtttttaggaggtgagtgtatttatgtgaggagtagatgtttggttttttaggatttcgttgtttgtaatgatttatttataattggaaatgggggatatatattaaattcgacgttttttttttatcgtaatttatatttgttgttttaaataataggttggataagtaagttttagtaaagagaaaaaatattattgtatatataggagttagatgtaatttatagatatatatattataaaaattataaattcgtatttatatttagatatttatatatagttatataagtatttttgggttatatagtttgtagattttaaatgtgtatttaataaagagttgtttagggtgattaatataatatatatattttataatttttatatcgaaaatgatatattattgtagttattaattgaagtttttgtaatttataatgagaaattaggggttattagttttttattttttatgtagattttaaagggggatatttattaagatttttaaatataaaagtttttttttatttatgtatgtttcggaagagagtattttgaaaggttggatatgggggattttaaggattatttttgtgttgatggttatataatttttttttttttaattttatttttgttattatagaataaaaaagttagttatcgttgatgattatttttaatattttttggttattttatttaaaatttttggaaatttaaatatattttagtttgtgttgtttgttattttaggtgttgtttgtatgtatttttaacggattttatgtattattttttttggttggagtttttattttattaagttttttttagatgttggaagtaacgtacgtatacgtttagataaggttaattttgagttttttttgtagaggttaaggatattttatatttgtatttgttgtgtatgatttgtaagtggttttaattatggagagttaagaaagggttattcgaatttttgaaaaggtttaagtagaatgtttttaaagagatagtgaaaaatattttagtgtatgtggagtttttttttttttttgtataattttttttaataagatgatttatatagtttttaaaaaggaaaatattattagtaataagaataatattaattagatttagaaaatgggtattatttaaggcgtagggattttgaattttattatgaaatgaatatttatttgtttttttgtttttttttttttattttttttgtttttttatttttttttagggtgcggagagttttttatagtcggaatagacgtttagaagaggatttttgcgtttgggatagaaaagaaatgttaggagggatcgaggagggatggggtaatttggggtggaagttattaagtttggtgagagtgaatttgtaaagggtgattgtttttaaatttaggattgttgtgtgtagttttgcgcgaatagggatggacgttgtttgagtatagggtttcggataattttgttggacgtcgatttaattaaaattaaggagaagttttatgaattgtagaataaataattttgtagatttttaatttaatttttaaagataagttaaaggaaaagaatataaagaaggtgttttagaaggaattttagaaataaattttttattttcggttgaattttttatgtttcgtttttttttttttttttttttttttttttgtttttttttttttttttttttattttttttttcgtttttttttttttttttttatttttttttttttttttaaatgttaattttaaattatatataatttatatagattttttattaggagtattagtaaagatttttttttttgtttttagagttagttaggagatgagaagggattttttttaattttattgtgtggtgggatttgaaacgggttttatattttttgatttttagaattaaaattagtgttagattaataatttgaaagataaatattatagatttggaagtttagattttttaggtataagatatttaattaatggaaataattgtttttttttttttaaattaataattttgttattgttattatttaaagattattataatttaaataaaatgtatttggaaaaattttattttttttttttaaatgtttttaatattttttaatatttttttggtatattattgtttagtttaaaataaataaattttgagatttaataaaataaaatttgtaagagataattttatatataaattaaaataatataaggtattgtgttagtataattattttatagttttatatatgaataattttaaattttttatgtgtaattttattttatgttagtattaggtattttttaaagtggaaatattttgagatatttggttaaaatttaagttttttaggaaatttgaaaaataataaatttggttttattaagaatgaagtataaatttaaaaatatatatatatatatagagaaatatttttaaaatatataattataattaaaattttagttattttttttaacgtgggcgttattcgaaaagttttagatattgtaaggtaaatcgtttttacggatcgttttttgttattgaacgggtaatagcgttttttgtcggaattttatagacgtaaattttgtaagtttttttgatttttttttcggtaaaggttttttttcgtttttgaaaatttggtattgagaggaatatttttaaagtttattttttatgatatttattaattttagaaacgatcgttttagtatttaaaaagtttaaacgttcgaagaaacgtataataaaagtttagtcgttacggagaaaattttttttaatttgaatttattttttttgtttttattttttattatttttcgcgttattatttaattatatgacgtagggaaattattttcgtaagaatttagtaaatggaaatataaaggtaaaataaattttggatttgaaggaaattaaacgagtaaaatatgtatttttttcgttattttattttgttttatgtttatattttttttttaggttacgtatatgtttttttaggtggaatcgtatttgagatattttagatagttaatattcgtattttttttttttatttgtatttattttagtttaaaatagtaaagaaaagaattatttatatttttttttttttttagttttatatagagggaatattatttagtaaatgtcggagtttataattaaaagtaaatgtatttagtatgaagttttttgttggtgattttcgaagtatgtttaggattgttttttaaaaaatgtatagaaaaatattattattaaattaaggttaattaggagtatttttatgtttttttttattttttttttaaaaatttaattatgaattatttaaatttatttgatttttttttttttattagtttttatttttgtatttgtgggttaatattttatgaattatttttttttgtagatgtttattgtattattttttttttttttattatatagtttttttgggttttttttttttatttatttaacgtataaaaataataaaattagaaaagttaagaattagaattattgtgttaagtttgtattttggttttttttattttaggcggtggggtaggttatttaatagtttgaggtttagtgtattgaattataaaatggaaatgattgtgaaaatttattaaaatagtatttgtgggtaaatatatgtggtattattgttttataaataatttaatttattattattgttttaaaatatttagcggggggttaggaaagtggaggtttttaaaaattagggatttgtaataaatttttggttagaaagtggaggtgggaaatttaatataggtttttagattgtgtatttaacgttttgtttatagttttatgatgttgttttatttttttttttttgaagttaagaagatagtatttttggattattgagtatgtttagggttattttttatagttttggatttataagtaggtaaaggaaagaagagaggaaggaaaaattgttttattttagtatttttagatattgttttattttttatttattagaagtattattgtttgttgagttgaataataagatacgatatttatataatagattttgataagttaaaaaatgataaaatatgatagttttattttttattgttgtagtttggtttttaatttttttattatgtttttgttttaagtttttttatgattatatttttggggaagatttagtaggtgtttttattattaatttggaaataaaatattgttgaatgtttgaaattataatttaagtatttgtttttagatttttagggttttgatattatataggttttagtgatttggtatgaggaaataaaataggagggattaatgtttgtataggagtgtttttaaaaaatgaaatgtgggtggggttatttttagattgattttttataattatcgagattgaggtaagtattaaataggaaagagtattttttattttaattataatatttagttgatggtatatttgtaaatttgtaaaagatattgagttgaaattatttgtgagaataaaaataattgtaattgtgaaaatttattttttttttgggatttttgaggagtaatagtaattttattatagattttagatgttttgatttttttaagtttttttgtttaattacgggggtatgaagtggttaaggggatagttttgaaatttttattttttggaggtaaagaggttaaggaaaggaagatgaggggttgaagtaaatgatgtaaatagttatgtaataattgtttttaatattaatgggtattttatatttaaaatgtgagaggtgtgtgttttttttgttatgattaatgtaggaggataggtatttttattattgtggatgttttttatattattgttttaagaaggagaaattttgaagggtgagaatatt

SEQ ID NO: 183 - DNA, 15306 bp, Artificial Sequence
  chemically treated genomic DNA (Homo sapiens)
tattagaaattaatgttgaattagtttttgaatgtttatttttttaatttttgagatagttttaatttgtcgtttaggttggagtatagtggtgcgatttttattattgtaatttttgtttttcgggtttaagtgagttttttgttttagttttttgagtagttgggattataggtatttgttattatgttcggttaatttttgtgtttttagtagagatagttttattatgttggttaggttggtttcgaatttttgattttaagtgatttgtttgtttttgttttttaaagtgttgggattataggtatgaattattacgtttggtttagtttttgaatttttaaaattttattattattattattattattattattattattattttatggatggagtttcgttttgttattaaggttggagtgtagtggtgcgatttcggtttattgtaatttttatttttcgggtttaagcgatttttttgttttagttttttaagtagttgtgattataggtgtttattattatgtttggttaattttttttgtatttttagtagagatggggttttattatgttagttagggtggttttaattttttgatttcgtgatttatttattttggatttttagttaaaatgtattgttaagatagggttttatattgttgtttagtttgaagggttatggcgtgattatagtttattgtagttttgaatttttgggtttaattaatttttttgttttagttttttaagtagttgggattttaggtatgtattatcgtgttagtttaatttttttttatttttttgtaaagatagtatttagttatgttgtttaggttggtttttaatttttggttttaagggatttttttgtttcggttttttaaagtgttgagattataagtgtgagatattgtgtttggttattatttgaatttaaagttaaggattagtaatagtgttttggagagttatattgaagtttgagggaaagggaaaaattagtaatattgagatagttattaaaatgtggagagtgtgtttagtatggatttttggtagtaatttattttattttattttattattttatttatgtattattttattgagatagggttttgttgtgttatttaggttggagtgtagcggtacgattatagtttattgtagttttaatttttttgggtttaagtaatttttttattttattttttcgaatagttgggattatattattacgataagttaatttttttatattttttatagagatggtgttttattacgttgtttaggttggttttgaatttttgagttaaagtaatttatttatttgggtttttcgaagtgttgggattataggtatgagttattgtgtttagttaattttgatgttttaaaatgttaaattaagacgtaatttgaggttgggcgcggtggtttatgtttgtaatttttgtattttgggagattaagattggtggattatttgaggttaggagtttaagattagtttgggtaatatggtgagattttatttttataaaaattgtaaaaaatatttgggtatggtggcgtatttttgtagttttagtaatttaggaggttgagggacgagaattatttgaattcgggaggcggaggttgtcgtgagtcgagattgcgttattggattttagcgtgggtgatagagcgagattttgttttaaaaaaaaataataataataataaagaaaatttaatataatttattttgggtgttgaaatttttgttatttttttatattttgcgatgttaatttttgttttaggaattagattttgtgtgggtttagaaatgatttttaagataaatgaaaaagtaggtttttgttattttttggtcggattttaaatgtcgttgttttgcgggggtttttttgatttattaggagaggggatgagtgtttattatttagtttagtgtgggtagttagttttcgggtttgtttgggttatttatttgtgtttagggttttttttttattttttttgttaaggttgtttttagggatattagttttgtagattattttttgtagtttatatatgtgtttagttttgtattatttttcgtgtagagagaaaagagtaaaagtatagtttttcgtttttgggagataaaattggattaaggaggttaggtgtagtagtttatgtttgtaattttagtattttgggaggcggaggtaggtggattacgaggttaggagttcgagattagtttggttaatatagtgaaatttcgtttttattaaaaatatataaaaattagttaggtttggtggtaggcgtttgtaattttagttatttgggaggttgaggtaggagaataggagaatcgtttaaatttgggaggtagaggttttagtgagtcgagatcgcgttattgtattttagtttgggcgatagtgtgagatttcgttttaaaaaaaaaaaaaaaaaaaaaaaaaaaaaaattgaattagggagatagttagagaatattttgaaggttatatataattaagtatgatagaatgttttgttttggaaaataataaaagtaagtataaaataaggttttgattagaggtgaggtgtggtaggtgggaggatgagtgtgatataaagaattagggttttttgtagttagtatttttgagtgtatttttgtttgtagttgtgagtttttgtttttttatgtgtaaaatgagaggataaggagatagtaatgtattagaatagtttgtttattgttgggtgaggtggttgatgtttgtaattttggtattttgggggatcggggtgggtagatcgtttgaggttaggagtttgagattagtttggttaatagggtaaaattttatttgtattaaaaatataaaaattagtcgggtttggtggtgtgtgtttgtaattatagttatttgggaggttgaggtagaagaattatttgaatttaggaggcggaggttgtagtgagtcgagatcgtgttattgtattttagtttgggtgataaagtaagatttcgttttaaaaaataaaataaaataaaataaaaaaaagaatagtttgtttattaagggtagttaaaaataggttttttattagggttatttatggtttatgtttgtaattttagtaatttgggaggtagaggtaggattttttgagttttaggagtttaagattaggttgggtaatatagtgagatttttatttttatttgttgaaaaatagtaaaaaggtttttttttttttttttttttttgagacggagttttatttttgttgtttaggttggagtgtaatgatatgattttattttattgtaatttttatttttcgggtttaagcgatttttttgttttagtttttcgagtagttgagattataggtatgagaagttaggttttcggttaattttgtatttttagtagagacggggtttttttatgttggttaggttggtttcgaattttcgattttaggtgatttattcgttttagttttttaaagtgttgagattataggcgtgagttaacgcgtttagtcgaaagtttttttttttttaagtagaaatatagtaagttttttagagatttttttttggttaagtggtttgggatttttttttagagaaattgtttaataggttgttttaaggattggagagcgtgtatgtaaaattgttcggtatttatcgggtgttggtaatatttaataataatattttttaataataatagtaattattgttattagtaggaataagttaaattaggaggcgcgatttaggcggaatttggaaggcggtgggtaggatttaggatattttaaggtaggcgtgggttttttgagttaggagttaattttttaggagttaggggagggtttggggtcggaaggtgcggcgtgcgagcggaggacggaagttcgtcgttagggttttcgtttttgttttaagtcgttatttttttttggggagcgtattttggcggaggggtaagttttatacgggttttgttatgaatgggaagttgtagtttttagttcgcggagggaatagtgcgggtttgggggaatagtaggggattcggtagtaattagtagattttttcgtagcgttggtagtttgcgttcgggggtcgttgtcgtttaggttcgtttttatttttttttttttgtcggggttttcggttttttagggcggttttagtattcgaggcgttttttgtcgtttcgtcgtcgggtttaagatttttaggattcggagtttcggtcgtgcggttagttaagtaaggcgggagggaggaagttggtcggttttcgaagttagtttcgagttatatgtgggaagcggtggttgtgacgtaagtttttagggggttttgggttcggttcgaagggagtatatcggagaggtttcgtttcgtgtagttgtaatggtgaaaaagtagaagttttaagcgcgaattttaggtcgttttttttgttgtcgttgtacgttcgatttagtcgcgtttttttttttttgcgggtcggtcgagcgcgcggattttgttttgggttagtcgttgttggatttcgggttgtacgggttgggttttttgcgcggtggttggttttttttttttttttttttgtaacgtttgttaatttgttagttgatggattttattatttatagtggcgtatgtagttcggtcgtagttcgttttatttacgtcgcgtttcgtaagttcgttcgcggttttcggttttttgcgtttcgcgagaggtttgtagatttcggttgtagtcggttttcgggggttcgcgtttttttcgtttcggtttcgcgtcgttcggggggcgttgtaaatagttttttgtttatatgtaattttttatttcgcggaaggaggtcgggggagtgttgagtttttattagttgtttttcgttttgaaatagatatttgattagttgtaaatatatatatatatatatatatatatatatatatatatatatatatatacgttcggggaggtaggtcggagagatttttttttcgtttttttcgttcgttttttttttttcgtcgtcgtcgtcgtcgttagtatttgggatcggtcgattttgtattttcgttcggcgttgttttttgattcggatttttattttgtatttttcggttgatcgcgggatttggttcgtgtagaggaggggggtcgatcgttatggagtattttatggtgtttatttagaaggtgttttttttgtaatattttaggaaaatagagaaagaagtgataggagggttttgtaggtgtgtattttttttttttttattttttttttattattgtagttttcggttagttcgttcgggcgggcgcgcgtgtgcgtacgtatggttcgcgtcgtcgatttcgttagttttttttagttgtcgggacggttgtagttttatacgtcgggttcgcgtcgtttcgggattttttttttttggagtatgggggttttaagcggtttcggttatttttgttcgttgtaggcgggcgagtcgcgacgtttgtaaattgtaaatagatttacgtggttttgtagtagtttcggttatgtttggtgttggtggttttttttttcgcgtttttttttttttttttttgcggcggtttttttttttttttttttttttcgggatttgaggtcgtttttatttaagggggtttgggggttcggggcgcgcgtgggggtgtagttagggcggttataatgtagttatgtcgcggttttcggcgcggggtgggggcggggagtcgggtattgtgcgtgtttgtagagcggggttgtagcggggtcgggggcgtgttcgcgtgtgggtgttgggggtgggcggatttcgaggggttcgcgcggtcggtaggggcgtcgcggttcggggtacgttggttgtcgttcgttcgttcgttcgcgttcgggcgttgtttattagcgaggtttggacgtgattttgtagtttttttggagtaggcggatttttgcgcgcggtttcgcgggagttgtagtttttcgtgttttgttggtgtagtattgtgggatttgtaggcgtttttgggttacgttttttttgtataaagttcggttttcgcgggtacgatgggtaaggtaggttaggtgggtaggttatttggggaagggatatttgaggtcgtttttagtttcgtagggtagtttttcgtcgtacgtgggttttttttgtaaatttttttatttaacgttttttttttttgtcgtaaatcgaaagcgtcgggttttttagtcgggtgggtggttcgaggttcgtaggtttttttagaagttattttgtaagttttggatttaggttgttttaaatttaaagggtgatggatttaaggattatatatagttaaattatttcgtatattttttaaaatgtatatgtttggaattttgatcgttggggttcggatatttgtattttgaacgattttttgggcgtggtgtgggggaggtgggcgttttacggcgtgcgtaagtttgggatttgtggttttttttttgtcgcgttgttttaggagcgaaatggttttttagggttggagttacgtgttttgtcgttcgaggtagtttgggcggggattgagggaggaggagttcgtcggtgtggtataggttggtggacgttagcgtttgtagaattcggtttggagggaaggttgttgtatacgtgtagatatttttgtttaattttttgtttcgggggtttttattttaaggttattttgaagtttttagttaatatttagatttgggttagttgatgggtttggtagttggtagggatgtttcgagggttggtttttgtacgaggtttatttggagggtttagtaataataagtaaaaaaaatttttgagttttttttatgttttggggatttattttgttagaatttttttattgagttgttataatttttttatgagttaaaagtgttttttgatttcgtttaaagaggcggatatagagattggagaagggattattatagtaggtggtggaattggaatttgaatttttgttttggggttgttgttgttgtagggttgggttgggtagcgcggaggtgtagttgagtcgttgtgtttattggagaagatattttgggtttgattttgggtagggttggggggttttttggttgttatgtttgggttttgggtgagtttttttagggttttttgagattttggttttaatttatttttgttttaagcgtttttttggaggatattagtagttttttagggtagttggattttggtaggttaaggatttgaaggtgtagggttttcgtttagggttggatatggtaacgtttattgtaagatagttgttagttgtgtattaggtatggagttgggggtttttggatttgtttatttttagtaggggttgtagggtgaggtgggaagttagtttgggattaaatgtgtttattaggtaggattttttggttagatgtatttgttttttagggttattttaggttggtgggttttgttttattttttagtgattagtagggatttttttgtttttttgttttttaggtttgttagaggggattgtagggtacggtgttgtatatataagttgtaggttttggatttgtcgtttaatggtttttagtttttgggaaatagagtatttgtgagaaaattagttatgggtatggtaagtgtttggtagttgtaaaaatgatatttagtttttttttttttgagacggagttttattttgttatttagaatggagtgtaattttggtttattgtaattttcgttttttagatttaatcgatttttttgttttagttttttaagtagttgggattataggtatgtgttagtatgtttggttaatttttttatttttagtagagatggggttttattatagtggttggttaggttggtttcgaatttttgattttaggtgatttgtttattttggttttttaaagtattaggattataggtatgagtaattgcgtttagttattgagttttaaaagtaggtatatgggtaggtatatggtagtttttatttatattttgtgttttgtttgtttgtttgtttgttttgagatggatttttattttgtcgtataggttggagtgtagtggcgtaatttcggtttattgtaatttttgttttcggggtttaagtaatttttttgttttagttttttaagtaattgggattataggttcgttttattatggtcggttaatttttgtatttttagtatagacggggttttattattttggttaggatggtttcgattttttgattttatgatttgttcgtttcgtttttttaaagtgttgtgattttagacgtgagttatcgtgttcggattttttatttgtattttttttttttttttttttttttttgaggtagagtttcgttttgtcgtttaggttggagtgtagtggtgtaatttcggtttattgtaagttcggtttttcgggtttacgttatttttttgttttagtttttcgagtagttgggattataggcgtttattattacgttcggttaattttttgtattttaattagagataggtttttattgtgttagttaggatggtttcgattttttgatttcgtgatttgtttatttcggttttttaaagtgttgggattataggcgtgagttatcgcgtttggtttttgtttgtattataaagtttttaggtttggttcggtggtttaagtttgtaattttagtgttttggaaggttaaggggaaaaaattatttgagtttaggagttcgagattagtttgggtaatatagtaagattttatttttataaaaaataaaaaaattagttcggtatggtggtatgtgtttgtagttttagttttttgggaggttgaggtaggaggatggtttgagtttgggaattggagattgtagtgagttatgattatagtattgtattttagtttgggtaatagagattttgttttttaaaaaaaatagtaagattgggtgtagtggtttatttttgtaattttagtattttgggagattaaggcgggaggattatttgagtttaggagttcgagattagttttagtaatatgacgaaattttgtttttattaaaaatataaaaaattagtcgggtgtgaatggtgtgtatttatatttttagttgtttgggaggttgaggaaggaggacgatttgggtttaagaagttgaggttatagtaagtcgagattatgttattgtattttagtttgggtgacgggagtgagattttgtttttaaataaataaataaaaataaattaaaaaaataataaaatttaaaaagtttttataagaaggagtttaagaaaattgaaggttttggagtgtttattgggtttttgatttatttatgaagtaataatattttgtcgggattgaggatatagttacgaataggatgtgatttttgtttttagtagtttatagttttgtggttttaaaaggttttgtagattttttaagagttttatgggttgttttggatatttgggtgtaaattaatttttgggtttcgatttttcgagtagttgggattatagatacgttttataatattcggttaatttttgtatttttagtagagagggggttttattattttggtttggttggtttgaaatttttgattttaggtgattcgtttattttagttttttaaagtgttgggattataggtatgagttatcgtgtttggttttttttgattttttttaaattttattatgattttgtgaagtgaagtagtgtttttatattttatagacggaggaaatcgaggtttggtgttgtatagttagtaagtggtaaggttggatttttttatttgagtttagtgtagggtttttattgatgggttggaggagttttggggaagggagggaggtagggatgtttttgatggtaatagtttgggtatggtgtgttttgggatcgaggggaagggtagtagattggttaggttagagtatagagtatgggtgagtagtgtagaagtagcggggatggagtatggatgagaatttcgggttgattatgttagagaaggatgagtgttttagtgtttttttgggtttgggagaatttcgtgtggatttttttacgttgattgtgtagatgttaagtgattttgaggtatgtgagtgattttagggtagtgtgaaatgaaagtttttagtggtcggtttgaggttggagttgggtaggtaggtgtagagggattgggggtatttgattttggtttgggtaggagggataggtatttggtagggttttagatttgaagggtatgttttatgtttttaagtgtttggttgggacgttagcgttagttttagtagattttgtgggtgttgtggtggtaggtgtggcggtttttgttttagtatttaaggttggtgtttaaattttgttttttggttattggttgtttagtgattttatttttaaatttagggtagtttttgtttggatttaggaggttggtttgtaagaagtaagagagttttggtgtggttgggtatggtggtttatgtttataattttagtattttgggaggtcgaggcggatggattatttgaggttaatagttcgagattagtttgattaatatggtgaaattttatttttattaaaaatataaaaattagtcgggcgtggtggtgggtttttgtaattttagttattcgggaggttgaggtatgagaattgtttgaattcgggaggtagaaattgtagtgagttgagattgtgttattgtattttagtttgggtaatagagcgagattttattttaatttttttttcgttttttataattagttaggtttggtggattacgtttgtaattttagttatttgggaggttgaggtatgaaaatcgtttgaattcgggaggtagagattgtagtgagttaagattgtgttattgtattttagtttgggtaatagagcgagatttagttaaaagaaaaaagagaatttcggtgttggtggatttgggttatttttgatttttatttggaggagtttgaagtggttagagagaggatagtggatttttattgtgtgtgtaggacgtttatagattttaatcgtaaatgtaaaattttagaaagagttattagaaatttttaggtatttgtagaaaaatttattttatttagtgtagtattatttggaaattttaattaattattttttattaataggaatttttggttggttagttattagaagttttggttggttagtattttattaataagaatttttggttagcggtattttattaattataatttttggttagtttttattttattaattagaagttttggttagaatgtattttattaaaggattttgtcggcgggtatttttagggtaatttaggtgagttatatttgagggttttggtggtagatttaggttttacgaggaattgtattttttggggggaaatttgtttttttggatttaagaaagtgtttaatttaagttaagtattaggttagttagtagttggtttttgagttaggagattgggttgatggttttggagaggaaggaggtaggatggagtattggagaagttgggtcggtagattttgatgtagaggaggaggcgatataggtttttgattttagttttagttttttttttttgtgagaatttttggttggggttttcgggattggggtttggtggttttttttggttttttagttagtgggttgttttgcggggaagggacggaagaggttgagggttagtttttaagagtagaggagttggtgggatttgggtcgggaggtgtagaagggtgtatttggttgtattttgttttgtttagttgttgggtgtgattttgggtaagttattttatttgtgggtttgtgtttagaggggtaggggtgatggttgagtttgtagttatatattcgtttttgataagtggcgggttgtgtgaattagtagttagtagaggcgttttagtgggttggtatttgtaggttgttgttgtgttaggtttggttatttgattttgggattattatttttttttttacgattttgtattgtttgtttattgtaatttcggttattttattgggttttgtgagaattaggtagggaaaaatgttaacgaggtttgtgaataataaaaagagttatacgattatagcgattttcgaatgtttggtttttttttttttttttttttttttttttttttgagataaggttttattttgttgtttaggttggagtatagtgatatgattatagtttattgtagttttaattttttgggtttattatatttttttattttagtttttttagttgttggaataatagggatattttattatgtttggttgattaattttttttagtgatggggttttattatgttgtttaggttggttttgaattttggggtttaagcgatttttttattttggttttttaaagtgttaggattataggtgtgagttattgtgttcggtttagtttttttttttatagggataattgttatttgttagttggggtatttggttttgtgggtcggttagagtttattttgttttatggtttgatatttgttttggggttagggtttacgtttagcgtttgttgtagttggattttatttaaatttttgtgtttttttttttatatgggagtttttaggttatttgatttaggaatattgtgataatttagtgagaaaattttcgttaaaaatttaaaaaaaaaaatgtatttttttgttgtggattttttaggagggttagtttttaggtggtttaaggttggatttggtgttttttttttattttttagttagttttggtttttgggtattgttaggagggatttaggggttgggtgggtaggggtttttttttatattttttttgagggggatggtgatgttttaagattgtatttattttgtgttgtggttttttatggatatttttttttattttttatttttaaagagttttagttttaagttatttattgtagagtagttttggtttttttggtttgttggttttttagatatggtatggtttgagtttgtgttaggtttgggagtttggatttcgttttaaggttgggttatatatagtcgtgtagtaggtttgttttagtttttttattatttttattttagggtaggggaatcgggagaagtgagagtattgatatttagttgatcgattttaaaattattttttttttgttttgtattttaaagttttatggaaagtggggggttcgggttttttttgtagtgttgatattttaagattttgtaagagatttgtattttgggtgtaggttttgggtttttgggttttgatggaggagggggtttggtttgatgaggacggaaggaggttgatttgtatttagattttcggcgttggatatttttttattgggagaggaagtcgaggtcggggaaggggtagcgatgcgtttagggttttatagggagttaaggttggatagatgggtaggttgggtggggttaggaaggttacggttgtttttagttgttgtagatgtgttgttttcggggttcgtgtaaattttttttcgtttgtaggttggcgaaggggttagggtatatagtaggggagttagatttggtagttttttgattttagattgtttttattaatggagtaggagttgtttagaattttttttttgtttttttatatttaggggtatgagtttttttggtttagttttggaatagggtatttcgggagggttttttaggaagaggtcggggttgcggtttcgggtggggtcggtagtttttgttgagagtttagtatttggaagttattaggttaggggcggggggagttgtaggggaggtttagggagggggatatgttttttttaggttatatataagtttaattttcgggagcgtggttttgggtttataatcgttgtttttgtattttggttcgtagtttcgttttttggcgtatacgtttcgttttcgttcgaagttacgtttttagttagtagttacgttttttttttttaggttgtttttttatcgtattggttattgtttttgtaagggttagtagcgttttttatagtatggtgggagtttcgttttttcggcgtagggtgggtttattttttggagtgggtgggttgtggggagtcgtgtttttaggggttgttggtttggtgtttttttggggagtgagtggtatttgttttttgtgaagttttagtttagcggggttggggtttgtggtgggaggcgtggtcgtgagggtaggaagggagtggggacgttttttttagttttggggtggtaaagtttgagacgttgaagaggcgttttaggtgtttagtaaattatttagaagtgttttaggagcggggatagcgtttttgaatgtcgtttgtatttcgcgtgtattagaattatattacgtacgtttttgggttttatcgggtttgttagttagacgttggggttagtattcgtcgtttgtatagtttttaagtttttggatgttttgatgtttagatatattgggaattttgtttcggaggagagattgttttttgtgaggaaagttagggaggggatgggtttttgttgttgttgttgagataaggttttgttttgttgtttagattgaagtgtagtggcgtgattatagtttattgtagtttttaatttttgggtttaagcgatttttttattttagttttttgagtagttgggattataggtatgtattattatatttggttaattttatttttttgtagagatagggttttattacgttgtttaggttgattttaaatttttaggtttaatgatttttggttttgattttttaaagaattgggattattgtgtttggttcggggtgggttttgagcggattattttattcgtagttagttgatttagttcgtttcggtgttttagagagtatttttttattattttttgggggtggtttggtattttttgtagtaggggagggatgtagtttttattggggttttttggagatgaatgatgaagagggcgttttggtcgagtttgtttttgttttttttggtagt

SEQ ID NO: 184 - DNA, 15306 bp, Artificial Sequence
  chemically treated genomic DNA (Homo sapiens)
gttgttagagaggatagggataggttcggttaaggcgttttttttattatttatttttagagggttttagtggaaattgtattttttttttgttgtaaaagatgttaggttatttttagagagtgatggaggggtgttttttgggatatcggggcggattgaattagttggttgcgggtaagatagttcgtttagaatttatttcgggttaggtatagtaattttagttttttgggaggttaaggttaaggattattgagtttaagagtttgagattagtttaggtaacgtagtgagattttgtttttataaaaaaataaaattagttaggtgtggtggtgtatgtttgtagttttagttatttaggaggttgaagtgggaggatcgtttgagtttaggagttggaggttgtagtgagttatgattacgttattgtattttagtttgggtaatagagtaagattttgttttaataataataataaaaatttattttttttttggttttttttatagggagtagtttttttttcggaatagaatttttagtgtgtttgagtattaaaatatttaagagtttagaaattatgtagacgacgggtgttggttttagcgtttgattagtaggttcggtggggtttagaaacgtgcgtggtgtgattttgatgtacgcgggatgtagacgatatttagggacgttgttttcgtttttggaatatttttgagtgatttgttaggtatttggagcgtttttttagcgttttaggttttgttattttaggattgaggaagacgtttttattttttttttatttttacggttacgttttttattataagttttagtttcgttaggttaagattttatagaagataagtattatttattttttaaaaagatattaagttaataatttttggggatacggttttttatagtttatttattttaagagatagatttattttgcgtcggagaagcgaggtttttattatgttgtggggagcgttgttgatttttgtaggagtagtggttagtgcggtgagaaggtagtttgggggaagagggcgtggttgttggttgggggcgtggtttcggacgagggcggggcgtgtgcgttagggggcggggttgcgggttagggtgtagaggtagcggttgtgggtttaaggttacgttttcgagggttgggtttgtgtgtggtttggaggaggtatgtttttttttttggattttttttgtaatttttttcgtttttggtttgatggtttttagatgttgggtttttagtagaggttgtcggttttattcgaagtcgtagtttcggtttttttttgaggggttttttcggggtgttttgttttaggattgggttaagggggtttatgtttttgaatgtgggagaataggaaaagggttttgggtagtttttgttttattgatgaaggtagtttggggttaaggggttgttaagtttaatttttttgttgtgtgttttggttttttcgttagtttgtaggcggaaaggagtttgtacggatttcggaggtagtatatttgtaatagttggaaatagtcgtggtttttttggttttatttagtttgtttatttgtttagttttggttttttgtgggattttggacgtatcgttgtttttttttcggtttcggtttttttttttaatagagaggtgtttaacgtcggaagtttggatgtaaattagttttttttcgtttttattaagttaagtttttttttttattaggatttaaaggtttagggtttgtatttagggtataagttttttatagggttttgaaatgttagtattgtaaaaggggttcgggttttttattttttatgagattttagggtgtagggtagagaggggatggttttagggtcggttagttggatgttagtgtttttatttttttcggtttttttgttttgaagtggaggtgatagggggattggagtaggtttgttgtacggttgtgtgtggtttagttttagggcggagtttaggtttttaggtttggtataaatttagattatattatgtttgagaggttagtaggttaaggggattaggattgttttgtagtgggtggtttaaagttggggttttttggaggtaagaggtgggaagagatgtttataggaagttataatataaggtaagtgtaattttgaggtattattattttttttaggagagatgtggggagagatttttgtttatttagtttttgggttttttttggtaatgtttaaaagttagagttgattagggggtgaaaagggagtattaagtttagttttgggttatttgagagttggtttttttggagggtttataatagagggatatatttttttttttaagtttttggcgagaatttttttattgaattgttataatgtttttgagttaggtggtttgaagatttttatgtaaagaggggggtatagaggtttgggtagggtttagttgtagtaagcgttgggcgtgaattttgattttagagtaggtgttaggttatagggtagaatgagttttgatcggtttatagagttagatgttttaattggtaggtgatagttatttttgtaaaagagaagattaggtcgggtatagtggtttatatttataattttagtattttgggaggttaaagtaggaggatcgtttgagttttagagtttaagattagtttgggtaatatagtgagattttattattagaaaaaattaattagttaggtatggtggagtgtttttattgttttagtaattgaggaggttaaggtgggaggatgtaataagtttaggaggttgaggttgtagtgagttgtgattatgttattgtattttagtttgggtaatagagtgagattttgttttaaaaaaaaaaaaaaaaaaaaaaaaaaaaaaggattaggtattcggaaatcgttgtaatcgtgtaattttttttattatttatagatttcgttgatatttttttttgtttgatttttataaaatttagtggggtggtcgagattatagtgagtaagtaatgtagggtcgtgggaaggaaggtgatgattttaaggttaagtagttagatttggtataatagtaatttgtagatgttaatttattgaagcgtttttattgattgttagtttatatagttcgttatttattagaagcgggtgtgtgattgtaagtttagttattatttttgtttttttgaatataagtttataagtgaggtgatttgtttaaggttatatttagtagttgggtagggtagggtgtagttagatgtatttttttgtatttttcggtttaagttttattaatttttttgtttttgggagttgatttttagtttttttcgtttttttttcgtaaggtagtttattaattgggagattaaaggagattattagattttagtttcgaaaattttagttagaagtttttataaggaagaggagttggggttgggattaggggtttgtgtcgtttttttttttgtattagaatttgtcggtttagtttttttaatgttttattttgttttttttttttttaaagttattagtttagttttttggtttagaaattagttgttggttaatttagtgtttaatttaggttaagtatttttttaaatttaagaaagtaaatttttttttaaaaggtatagtttttcgtgggatttgaatttgttattaagatttttaaatataatttatttaaattgttttggaagtattcgtcgatagagttttttaatagaatgtattttaattaaggtttttgattggtggaataggagttaattaggggttgtgattggtggagtgtcgttaattaggaatttttattggtggaatgttgattaattagggtttttgatggttgattaattaggggtttttgttgatgaaggatggttgattgaaatttttaggtgatattgtattgaataaagtggatttttttgtaaatgtttgaaagtttttgatagttttttttggggttttgtatttacggttaaggtttgtaaacgttttatatatatagtaaaggtttattattttttttttggttattttagatttttttaggtgaaaattaaaggtgatttaagtttattaatatcgaggttttttttttttttttgattgagtttcgttttattgtttaggttggagtgtagtggtataattttggtttattgtaatttttatttttcgggtttaagcgatttttatgttttagttttttaaataattgggattataggcgtgatttattaagtttggttaattatggggggcggagggggggttgagatggagtttcgttttgttgtttaggttagagtgtagtagtataattttagtttattgtaatttttatttttcgagtttaagtaatttttatgttttagtttttcgagtagttgggattatagggatttattattacgttcggttaatttttgtatttttagtagagatggggttttattatgttggttaggttggtttcgaattgttgattttaaatgatttattcgtttcggttttttaaagtgttgggattataggtatgagttattatgtttagttatattaaggtttttttgttttttgtaagttagttttttgggtttaaataggggttgttttagatttaggaataaggttattgagtagttaatggttaaggaataaaatttgggtattagttttggatgttaaggtaagagtcgttatatttattattatagtatttatagaatttgttgagattgacgttggcgttttaattagatatttggaggtatagggtatgttttttaagtttagaattttgttaggtatttattttttttgtttaggttaaagttaagtatttttaatttttttatatttgtttgtttagttttagttttaaatcggttattgagaatttttattttatattgttttgaagttatttatatattttagggttatttaatatttatatagttaacgtgggaaagtttatacgggatttttttaaatttaaaaaagtattaaggtatttatttttttttaatataattagttcgaggtttttatttatgttttattttcgttgtttttatattatttatttatattttgtattttgatttggttagtttgttgttttttttttcggttttagaatatattatgtttaggttgttgttattagaaatatttttgttttttttttttttttaaagtttttttagtttattagtgggaattttgtattgggtttaagtgaaaaagtttagttttgttatttattagttgtgtaatattaagtttcggtttttttcgtttgtaaaatatggaaatattgttttattttatagggttatggtgaagtttaaaagagattaagaaaggttaggtacggtggtttatgtttgtaattttagtattttgggaggttaaggtgggcggattatttgaggttagaagttttagattagttaggttaagatggtgaaattttttttttattaaaaatataaaaattagtcgggtgttgtgggacgtgtttgtaattttagttattcgggaggtcgaggtttaagagttagtttgtatttaggtgtttaggataatttatgaaatttttagggggtttataagattttttaagattataaggttgtgagttgttgaggataggagttatattttgttcgtggttgtatttttagtttcggtagaatgttgttgttttataaataaattagggatttaataaatattttaaagtttttaatttttttgaatttttttttatgggagttttttaagttttattatttttttaatttatttttatttatttatttagaggtagggttttattttcgttatttaagttggagtgtaatggtatgatttcggtttattgtagttttaattttttgggtttaggtcgttttttttttttagttttttaagtaattgggagtataagtgtatattatttatattcggttagttttttgtatttttagtagaaatagggtttcgttatgttgttgaggttggtttcgaatttttgggtttaagtgattttttcgttttggttttttaaagtgttagggttataagagtgagttattgtatttagttttattgttttttttaagagatagggtttttgttatttaggttagagtgtagtgttatgattatagtttattgtaatttttaatttttaggtttaagttatttttttgttttagttttttaaggagttgagattataggtatatgttattatgtcgggttaatttttttattttttgtagaggtggggttttgttatgttgtttaggttggtttcgaatttttgggtttaaatgattttttttttttggttttttaaagtattgggattataggtttgagttatcgagttaggtttaggagttttatgatatagatagaggttaggcgcggtggtttacgtttgtaattttaatattttgggaggtcgaggtgggtagattacgaggttaggagatcgagattattttggttaatatagtgaaagtttgtttttaattaaaatataaaaaattagtcgggcgtggtggtgggcgtttgtagttttagttattcgggaggttgaggtaggagaatggcgtgaattcgggaggtcgagtttgtagtgagtcgagattgtattattgtattttagtttgggcgatagagcgagattttgttttaaaaaaaaaaaaaaaaaaaaaaaagatatagatggagagttcgggtacggtggtttacgtttgaaattatagtattttgggaggacgaggcgggtagattataagattaggagatcgagattattttggttaaaatggtgaaatttcgtttgtattaaaaatataaaaattagtcggttatggtggagcgggtttgtagttttagttatttaggaggttgaggtaggaaaattgtttgaatttcggaggtagaagttgtagtgagtcgagattgcgttattgtattttagtttgtgcgatagagtgagagtttattttaaaataaataaataaataaataaaatataagatatggatggagattattatatatttgtttatatatttgtttttaagatttagtggttgggcgtagttgtttatgtttgtaattttagtattttgggaggttaaggtgggtagattatttgaggttaggggttcgagattagtttggttaattattatggtgaaattttatttttattaaaaataaaaaaattagttaggtatgttgatatatgtttgtaattttagttatttgggaggttgaggtaggaaagtcggttgaatttaggaggcggaggttgtagtgagttaagattgtattttattttgggtgatagagtgagatttcgttttaaaaaaaaaaagattgagtgttatttttatagttattaggtatttgttatatttatagttaatttttttataggtgttttgttttttagagattgagaattattaggcgataggtttaaaatttgtagtttgtgtgtgtagtatcgtgttttataattttttttggtaggtttgggagatagaaagatagggagatttttgttggttattgagggatggagtaaagtttattagtttgagatgattttgagaagtaaatgtatttggttagaaggttttgtttaatgaatatatttgattttagattggttttttattttattttgtaatttttattgaaggtaaataaatttagggatttttaattttatgtttaatgtatagttgataattgttttgtaatggacgttgttatgtttaattttggacgaaggttttatatttttaagtttttggtttattaagatttagttattttgggggattgttggtattttttaaaggaacgtttggggtagggataaattgaagttagaattttagggggttttgagaggatttatttaaggtttaggtatggtagttagagggttttttaattttgtttaggattaggtttagaatgttttttttagtaggtatagcggtttaattgtattttcgcgttgtttagtttagttttgtagtagtagtaattttaggataagggtttaagttttagttttattatttgttgtagtggttttttttttagtttttgtgttcgtttttttaagcggaattaaaagatatttttgatttatagaaagattatgataatttagtgagaaaattttagtaaagtgagtttttagaatataaaaagagtttaagaattttttttatttattattattgggttttttaggtgggtttcgtgtaagggttagttttcggggtatttttgttagttgttaaatttattaattggtttaagtttaggtattgattgggaattttagagtagttttaaggtggggattttcggggtagagggttgggtaggagtgtttatacgtgtgtagtaattttttttttaggtcggattttgtaggcgttagcgtttattagtttgtgttatatcggcgggtttttttttttttaattttcgtttagattgtttcgggcggtagagtacgtggttttagttttggggagttatttcgtttttggagtagcgcggtaggaaaggggttataggttttaaatttgcgtacgtcgtaggacgtttattttttttatattacgtttagggggtcgtttaaaatgtagatgttcgggttttagcgattagagttttaggtatgtgtattttaagaagtgtgcggggtggtttggttgtgtgtggtttttgagtttattattttttgggtttagagtaatttaggtttaaagtttgtaaagtggtttttggggaggtttgcggatttcgggttatttattcggttgggggattcgacgttttcggtttacggtaggggggaggggcgttggatgggaaagtttgtagaggaaatttacgtgcggcgggaagttgttttgcgaggttaggggcggttttaggtgttttttttttaaatggtttgtttatttggtttgttttgtttatcgtgttcgcgggggtcgagttttgtgtagggaaagcgtggtttaggagcgtttataaattttataatgttgtattagtaggatacggagaattatagttttcgcgaggtcgcgcgtagaggttcgtttattttaagagggttgtagagttacgtttaggtttcgttagtaaatagcgttcgggcgcgggcgggcgagcgagcggtagttaacgtgtttcgggtcgcggcgtttttatcggtcgcgcgggtttttcggggttcgtttatttttaatatttatacgcgagtacgttttcgatttcgttgtagtttcgttttgtaaatacgtatagtgttcggtttttcgtttttatttcgcgtcgggagtcgcggtatggttgtattgtagtcgttttagttatatttttacgcgcgtttcgggtttttagatttttttggatggggacgattttagatttcgaggaaggaaggagaggaaggaagtcgtcgtaggagggggaaagaggaagcgcgggggggaaggttattagtattaagtatggtcgggattgttgtagaattacgtgggtttgtttgtaatttataaacgtcgcgattcgttcgtttgtagcggataaaagtggtcggggtcgtttggggtttttatgttttaaggaaggagggtttcggggcggcgcggattcggcgtgtggggttgtagtcgtttcggtagttaagaaaggttagcggggtcggcggcgcgggttatgcgtgcgtatacgcgcgttcgttcgggcgggttggtcgggggttgtagtggtaggaagggggtggggggaggaggagtatatatttatagagtttttttattatttttttttttgtttttttgaaatgttgtaaagagggtattttttgagtgggtattatgaaatattttatagcgatcggttttttttttttgtacgagttaggtttcgcgattagtcggagaatgtaagatggaaattcgaattaaagggtagcgtcggacggaggtgtagaatcggtcggttttagatgttggcggcggcggcggcggcgaggggagggaggcgggcgggaggggcgggagggaggttttttcggtttgttttttcgggcgtgtgtatgtgtgtgtgtgtgtgtgtgtgtgtgtgtgtgtgtgtgtgtgtttgtagttgattagatgtttgttttaaggcgggaaatagttggtgaaaatttagtattttttcggttttttttcgcggagtaaggaattgtatgtaaataaaggattatttgtagcgtttttcgggcggcgcgaggtcggggcgagaggggcgcgggttttcggggatcggttgtaatcggggtttgtaggtttttcgcggggcgtagggggtcgggggtcgcgggcgggtttgcggggcgcggcgtgaatggagcgagttgcggtcgagttatatgcgttattatgggtgatgaggtttattagttgataggttggtaagcgttgtaaaaaaaaaaaaaaaaaaggttagttatcgcgtagggagtttagttcgtgtagttcggagtttagtagcgattggtttagagtagggttcgcgcgttcggtcggttcgtagggaggagggggcgcggttgggtcgggcgtgtagcggtagtaaggaaggcggtttggggttcgcgtttggggtttttgtttttttattattgtagttgtacggagcggagttttttcggtgtgtttttttcgagtcgagtttagggttttttggaaatttgcgttatagttatcgttttttatatgtaattcggggttgatttcggaggtcggttagttttttttttttcgttttgtttagttggtcgtacggtcgggatttcggattttgggaattttggattcggcgacgggacggtaaagggcgtttcggatgttggggtcgttttaggaagtcgggggtttcggtagggaggggagggtggaggcgggtttgaacggtagcggttttcgggcgtaggttgttagcgttgcggggaggtttgttggttgttgtcgggttttttgttatttttttagattcgtattgtttttttcgcgggttgaaggttgtagttttttatttataataaagttcgtgtgggatttgttttttcgttagggtgcgttttttaagagggggtgacgatttggggtagggacggggattttggcggcgagttttcgtttttcgttcgtacgtcgtatttttcggttttaggtttttttttggtttttggagggttggtttttggtttaggaagtttacgtttgttttggaatgttttggattttgtttatcgttttttaggtttcgtttaaatcgcgttttttaatttgatttatttttattagtaataatagttattgttattattgggaaatattgttattagatgttgttagtattcggtggatgtcgagtagttttgtatatacgttttttaatttttgaagtaatttgttaggtagtttttttaaggagagattttagattatttgattaaaaaaaagtttttggaaggtttattatgtttttatttaaaaaaaaaaaaattttcggttgggcgcgttggtttacgtttgtaattttagtattttgggaggttgaggcgggtggattatttgaggtcgggagttcgagattagtttgattaatatggagaaatttcgtttttattaaaaatgtaaaattagtcgggggtttggttttttatgtttgtaattttagttattcgggaggttgaagtaggagaatcgtttgaattcgggaggtggaggttgtagtgaggtgagattatgttattgtattttagtttgggtaataagagtgaaatttcgttttaaaaaaaaaaaaaaaaaaaaaaatttttttattgttttttaataaatagagataggagttttattgtgttgtttagtttggttttgaatttttgggatttaaggaattttatttttattttttaaattgttgggattataagtatgagttatggatggttttggtgggaagtttatttttaattgtttttagtgagtaagttatttttttttttgttttgttttgttttgttttttaagacggagttttgttttgttatttaggttagagtgtagtggtacgatttcggtttattgtaattttcgttttttgggtttaagtgatttttttgttttagttttttaagtagttgtggttataggtatatattattaagttcggttaatttttgtatttttagtatagatgggattttgttttgttggttaggttggttttaaatttttgattttaggcgatttgtttatttcggttttttaaagtgttaggattataggtattagttattttatttagtagtgagtaagttattttggtgtattattgtttttttatttttttattttgtatatgggaagatagaagtttatagttgtagataagaatgtatttaggagtgttggttgtaaaaagttttggttttttatattatatttatttttttatttgttatattttatttttgattagggttttattttgtatttgtttttgttattttttagagtaaagtattttgttatatttagttatatgtggtttttagagtgttttttggttgtttttttggtttaatttttttttttttttttttttttttttttttgagacggagttttatattgtcgtttaggttggagtgtagtggcgcgatttcggtttattggaatttttattttttaggtttaagcgatttttttgtttttttgttttagttttttaagtagttgagattataggcgtttgttattaggtttggttaatttttgtgtatttttagtagagacgaggttttattatgttggttaggttggtttcgaatttttgatttcgtaatttatttgttttcgttttttaaagtgttgggattataggtatgagttattgtatttggtttttttggtttaattttgttttttagagacgagggattgtgtttttatttttttttttttgtacgggggatggtatagggttgggtatatgtgtgaattgtagagagtgatttgtaaagttgatatttttggagatagttttggtagaaaggatgagagggagattttaggtataagtgggtggtttaggtagattcgggagttggttgtttatattgaattgggtagtaggtatttatttttttttttaataaattaaggaagttttcgtaaagtagcggtatttggagttcggttaggggatggtagagatttgtttttttatttgttttggaagttatttttaggtttatatagaatttggtttttggggtaagagttgatatcgtaaaatgtaagagagtgataaaaattttaatatttaagataaattatgttgggttttttttgttgttattgttgtttttttttgagatagagtttcgttttgttatttacgttggagtttaatggcgtaatttcggtttacggtaattttcgtttttcgggtttaagtgattttcgttttttagttttttgagttgttgggattataggagtgcgttattatgtttaggtattttttgtaatttttgtagagataggattttattatgttgtttaggttggttttgaatttttgattttaagtgatttattagttttggttttttaaagtgtagggattataggtatgagttatcgcgtttagttttaaattacgttttaatttaatattttaaaatattaaaattggttgggtatagtggtttatgtttgtaattttagtatttcgggaggtttaagtgagtggattgttttagtttaggagtttaagattagtttgggtaacgtggtgagatattatttttataaaaaatataaaagaattaatttgtcgtggtgatgtagttttagttgttcgggagggtgaggtgggaggattgtttgagtttagggaggttgaggttgtagtgagttgtgatcgtgtcgttgtattttagtttgggtgatatagtaagattttgttttaataaaataatatataaataaaataataaaataaaataaaataaattattgttaaaaatttatattaaatatattttttatattttaatgattattttagtattattgattttttttttttttttaggttttagtatagttttttaagatattgttgttgatttttagttttaaatttaaataatggttaggtatagtgttttatatttgtaattttagtattttggaagatcgaggtaggaggattttttgaggttaggagttggagattagtttggataatataattagatgttgtttttataaaaaaataaaaaaaaattagattggtacggtggtgtatgtttaaagttttagttatttgggaggttgaggtaggagggttgattgagtttaggagtttaagattatagtgagttatgattacgttatggttttttagattgggtaatagtgtaagattttgttttaataatatattttaattgggagtttaaagtaggtagattacgaggttaggagattgagattattttggttaatatgatgaaattttatttttattaaaaatataaaaaaaattagttaggtatggtggtgggtatttgtagttatagttatttgggaggttaaggtaggggaatcgtttgaattcgggaggtggaggttgtagtgagtcgagatcgtattattgtattttagttttggtgatagagcgagattttatttataaaataataataataataataataataataataataataaaattttaaaaatttaaagattgggttaggcgtggtggtttatgtttgtaattttagtattttgggaggtagaggtagatagattatttgagattagaagttcgagattagtttggttaatatggtgaaattgtttttattgaaaatataaaaattagtcgggtatggtggtaagtgtttgtagttttagttatttaggaggttgaggtaggagatttatttgaattcgggaggtagaggttgtagtagtggagatcgtattattgtgttttagtttgggcgataaattgagattgttttaaaaattaaaaaaataaatatttaaaagttggtttaatattgatttttaata

SEQ ID NO: 185 - DNA, 6030 bp, Artificial Sequence
  chemically treated genomic DNA (Homo sapiens)
  unsure (576)
ttatttttgttttttttagaatttttgtttttttttttttttatagatttttcgttacgtagttcgtgtaggttttttttatttttgtgaagttttaaatttaattttgtgggttttattaagttgtgataaagtatgtataggggttttggtagaagataacgttaatataggtagattggagttgggtttatgttgaaaaaaatttggattattaatttaagtggtttgttattgatttttagattagagatgtttaatagaattttttttagtgatggaaatgttttatatttatagtgtttaatatagtagttgttagttatatgtagttttatagagtatttgatatgtggttagtatgattgagaaattaaattttaaatttaattttatgtatttatttatttttataagatagagttttatttagtcgtttaggttggagtgtagtggtgtaatttcggtttattgtaatttttgttttttgggtttaagtgatttttttgttttaggtttttaagtagttgggattataggggtttgttattatgtttagttaattttttgtgtttntatagagagggggtttattatgttggttaggtttagttttgaatttttgatttaggtgatttattcgttatagttttttaaagtgttggaattataagtataagttattgcgtttggttgattttatttaattttaattattttaaatttaaatggttatatatggttaaggttattattttggatggtatagttttagatattagaagttatattttttattttgttttgtttttaaattgggagaatgatatatgttagaaaaaaaatggaaataatgtgggtatttgggtggtgaggatgaggtaagaagaaaattattttttgtttttgatattaatgtttttaataaggatgaggaatttaggaggatgagtgggtttgggaaggtagataggaagtttaatattgagttgagattatgggatatataaatagagatgtttaataggtatttaaagaagagtttatagtagaatagaaaaagttagggttagaagtataaatttttgtagttatttttgtagaggtgataaagttatagaatataggttatattttttagagtgggagtgtagattttgaagaaaagagtattgagtatagaatttagaaaaatgtgtatattgaaagagtcgagttaagcgtagtagtttatattcgtaattttagtattttggagggaggtaggaggattatttgagtttaggagtttagtttgggtaatatagtaaaattttgtttttataaaaaatataaaaattagttaggtatggtggtgtatatttgtggttttggttgtttgggaggttgaagtgggagggattatttgagtttaggagattgaggttatagtgagttgtgattatattattgtatattaattttagtttgtatgaaagaataaaatttttttttttttaaaaaaaaaagagagagagagagaaagaaaaaaagtggaaagaggaagagtagtaggtaaataggaaatatgaaatatttattatgtaatgtttttaagaaattggtatttaattatgtaagtgatagtagaaagtttttgttttaggtgtagtgtttgttaggaagatttaatattttatttgaaaatgtaagtataggtataatgtaattaatttttattgttttattatatagatttgatagatagtttttatttggttaatgtttgttattattatattattatagtgttatttttgtttatagaattataaatgtgtttgttaaatgggtttaatatttgggtagattgttaataaatgttataaattttagtttaaataaattagtttataaatttaggagaatgtttagttatttttggtgttttttagataattagtagttgtaattaatgatgtttaaatggattttttatataagattaaggagaaattgtttgatataatttatataatttgtatttttattatttgagtgggaagttttattattttttttatattgtgttatatatttgtagaagaatataaaaggtagtgattatgttacgtgttaagaaagatattagagtagattgaaggggtgtagtatgagtaaagaatttgagattagagaaaaggttttggaaaggaaggtaagtatggagaaggaaatttgaaggaatagattggttgaaggttagatttgtggagtagatagtaggtaataggttaatttgttgtttagtttagtgtttgatatataataggtgtttagtatttattgaaggaaggaatgggaaaaggaaaatttattttgtaagaatagtagaattttattttggttttattttattttatttgttatttgattttagttattatatttttttgattttgggttgttgttaggtttattgttaaaatatatattaaatagtttatattttaatttgtaattgttgtttagttttggataattggagggtcgggggggtgtttttttatttagagaatacgggaatacgtcgggcgcggtggtttacgtttgtaattttagtattttgggaggtcgaggcgggcggattacgaggttaggagatcgagattatttcggttaaaacggtgaaattttgtttttattaaaaatataaaaaattagtcgggcgtagtggcgggcgtttgtagttttagttatttgggaggttgaggtaggagaatggcgtgaattcgggaggcggagtttgtagtgagtcgagatcgcgttattgtattttagtttgggcgatagagcgagatttcgttttaaaaaaaaaaaaaaaaaaagagaatacgggaatatatttgagtatttggatgtttaatttttttttgttttaagattataatagagtaggtgtgattatatttagtttttgaatattttggttttgggtgatataggtgagtatttttagttgatttgataggttaaaggtgtatatttattttttttgtaagaagcgttatttggtaagatgattaagaatggtgtaaagtaggatggggagtttaaaattgtttttaaatgtgggaatgtaaatgaatataaatatgtaagattttaatatattaaattgattagattttgtgtaatttttaagtttttttttttttttaaaatttttttgaaatttgattgtttataaaaatttattttatagaattttatgtgatttatttatttagatattatattgattttatatttagtagtgaaaatagattttattgtagaatttggaaagatagagggttatataggttgtatttttagttttgtttatattaatacgtgtttataatttagtttaatttatattttgtattgtattattgttgttatatttttgtatgtatgtaagtataatatgtgttggtaaaggaaaattttgagtaagaagaagttttttgatttatttgatttaatatgtatttgagtgtttaatagatattgttttagatattggtgatataatattgaacggagtattaaatattttatagcgttttttggagttgttgttaagatatattttttaaggggaatattttagaataggtgataattagttaacgaaggaaaagtattttagttatttaggagagttgtatttagagtgaattgaaataaattaagtttacgaaagatagagattttttgtttggtttttgtttgttgtatttattattgtatttttagggtttaaaatagtgttcggtttataataagtatttagtaaatatatgttgttgattggagtgtttgttttgaatttttgtaattaaatatatattttggtaaattatttttatattttgttagttgaaaattttattttagttgttttgtttttaatgttattttgttttttgtttttatttgtgttatatattaggatgttggaaaagtttattaatattgatagttatatggttatttgatattgaaaagaatagatttggaaaggaatttaagaggttattttttgtttagttttttgtttaggaaaattaagtaagatgattaggtatgtatatttaattagttatttaaaaaaaaattaggataatataattgagtttttttttgagaaaatggagaaaggtatttaattttagttataaagggattaatttggaaattttagaatttttgtgtgggaaagtggaaaaaaaaaaaaagtataattaagttgttttttgttgatattagaaatgggtttgttatttattttggtattgaagtatagttttttatttcggggtaggattgggatatttttttttttttataagagttggatagttattataggtttaaaaagtttcgattagttttttaagagttttttttttttttttttttttgaaattcgtggtgtttttgttttgtttttaagatgtattaagttttttgttttgtgattgttttggagttagtagatattttgatatgtataatttaaattatgtaggttttacgagtaagtttaattttattttttaagttagttaaaaggtaagtgatatttagaaaaatgttaatttgtagttattttattttttttattttaagtatttttattgtttttcggttttttggttaagattaagtgtgtattttaagtattttttaaaataaaaatatttttttaatttaataagaaaataaggttttatatagaaaagtttttttatttaagatttgtattttttaattttttttgagatgtttttgttgtaaatagtatttatatgttttttgaaagttagttaattaaatagtttttttgagtatttttttagttttattgagaagtattttaaattgagtttttttgagttcgattgtttacgtttgatatagttttaagtttttattgaatggtaataaagattgtagaatgttgttggtattgtagtgagaggtatgtttttttagattaggtaagagagattagtttgttttttattgttgggtgagtttttatagtttttattttatattttttaagtagtagtaatattaaattgataaatagttaggagtacgttgattttaagacgtttttgtttgttgtagatagaaaaattatagggttatgtatgggggttggggtggggggggaggggaagaattagtttattatttagttatttatataaattaattaaaatgtgaaaataattttggagtttagtttttttaatttaggaattaaagtagtagttgaggaaattagtaattttaaaggtattttatggttattatttgtgaaagtaatttaaaggatagtttttatttttatttttttttttagtagttaataaaataagttttgtttttaattaaatattttttttatttacgaaaatttttaaattgttaatagtaaaatatattttttaaggatttttggaaattaatttgatatttgaaaaatattttagtttttatagttgttttatttttttttttttttagtatattttttttaaaagtatttgtgttttgaaaatgttagttgtattttaatgaagtttaggtattgtttgtttataaaggggtcggtgtattttattgttttatggtttattatgaggtatagtgtgagagtgtgggtggtattatttggtgtttgttttttggggtagtgattgttattatgttagttttggattggtaaagaaaatatagtatataagatgttatatgaatttggatattgtgaagaaaattttatttttaaataatttttaatgatttcggaatatatgataatttgattgaattgattattttaattatatttttgaagtttgtattttagttataacgtatattttattagatacgttttattttttgatatataatagtatttagttattttttgaagtttaataaggaagtgaatgtttttaaattatgatgtttttaatagat

SEQ ID NO: 186 - DNA, 6030 bp, Artificial Sequence
  chemically treated genomic DNA (Homo sapiens)
  unsure (5455)
atttattaaaaatattatagtttagaaatatttatttttttattgaattttaaagaatgattaaatgttattatatattaaaaaataagacgtgtttaatagaatatacgttgtaattaaaatgtaaattttaagggtataattgaaatgattaatttaattaagttgttatatatttcggggttattaagaattgtttaggggtaagattttttttatagtatttagatttatatagtattttgtatgttatattttttttgttagtttaaggttaatataatggtagttattattttaagaggtagatattaaatggtgttatttatatttttatattgtgttttataataaattataaagtagtggaatgtatcggtttttttatgagtaaataatgtttaagttttattagaatatagttgatatttttaaagtataaatatttttaagaaaaatgtattagggaaaaaaaggaatgaaatagttataaaagttgaaatattttttaagtgttaggttgatttttaaggatttttgggaagtatattttgttgttggtaatttaaaagttttcgtaagtggaaaaaatgtttagttaagggtaaagtttattttattaattattggggaaaaaaatgaaagtaaaaattattttttgaattgtttttataagtaataattatgaagtatttttaaaattattgatttttttaattgttgttttagtttttgaattaagaaaattgagttttagaattatttttatattttaattaatttatataagtaattgagtaataaattaattttttttttttttttttattttaatttttatatataattttgtagtttttttgtttgtaataagtaaggacgttttgaaattagcgtgtttttggttatttattaatttaatattgttgttgtttaaagaatataaaataagagttgtaaaaatttatttagtagtgagaaataaattgattttttttatttggtttaaggaagtatgttttttattgtagtattaataatattttatagtttttgttattatttagtggaaatttgagattgtgttagacgtaagtaatcgagtttagaaaagtttaatttaaaatattttttagtaaaattaaaaagatgtttaagaaaattgtttagttaattggtttttaaaagatatatgaatattgtttataataaagatattttaaaagaaattgaaaagtgtaggttttagatgaaggggtttttttatgtagaattttgtttttttattaaattaaaaggatatttttattttaaaaaatgtttaaagtatatatttgattttagttaaaaggtcgagaagtaataaaaatgtttaaagtaaaaagggtgaaataattataagttaatatttttttaaatattatttgttttttaattaatttaaaaaataagattaaatttattcgtgaaatttgtataatttgaattatatatattagagtatttgttggttttaaagtagttataaagtaggagatttaatgtattttgaaagtagagtaaaagtattacgagttttagggggaaaagaggaggagaaatttttgaaaaattggtcggggttttttgaatttgtaataattgtttagtttttgtgggaggaaaaaaatgttttagttttgtttcgagataggaggttatgttttaatgttaaaatgaatgataggtttatttttgatattaataaagagtagtttagttgtgttttttttttttttttatttttttatatagaagttttaaaatttttaggttagtttttttatagttagggttaagtatttttttttatttttttaagagggaatttaattatgttgttttggtttttttttaaatgattaattaaatatatatatttaattattttatttagtttttttaggtaggaagttgaataaaagatgattttttaggtttttttttaaatttattttttttaatattagataattatatgattgttaatattaataagtttttttagtattttgatgtatggtataagtagaaataaaaagtaaggtaatattaaaaataaagtaattgagataaaatttttaattagtaagatgtaaagataatttattaaggtatgtgtttgattatagaaatttaaaataaatattttaattaataatatatatttgttgaatatttattatgagtcgagtattattttgggttttggagatatagtagtgaatgtaatagataaaagttaaataaaaaatttttgtttttcgtgagtttagtttattttagtttattttaagtataatttttttagatgattaaggtatttttttttcgttgattagttattatttattttgaaatattttttttggaaagtatgttttgataatagttttaggagacgttgtaaagtatttggtgtttcgtttagtgttgtattattagtgtttaaaatagtgtttgttagatatttaaatatatattgaattaaatagattagagagtttttttttatttaaaatttttttttgttaatatatattatatttatatgtatatagagatatgataataataatataatatagggtgtaaattaaattgggttgtaaatacgtgttagtataaataaaattgaaaatataatttatatggttttttatttttttagattttataataaaatttgtttttattattggatgtgaggttagtataatatttgagtaaataaattatataaaattttataaagtaagtttttgtggatagttagattttagaggagttttgaaagaaaaaagaaatttggaaattatatagaatttgattagtttggtatattaaaattttatatgtttatatttatttatatttttatatttggaaataattttaaattttttattttgttttgtattatttttgattattttattagatgacgttttttatagagaaaataagtgtatatttttaatttgttagattagttagaagtgtttatttgtgttatttaaggttagaatatttaggggttagatatggttatatttattttgttatagttttaaaataaaaggaaattaaatatttaagtatttaagtatattttcgtgttttttttttttttttttttttttgagacggagtttcgttttgtcgtttaggttggagtgtagtggcgcgatttcggtttattgtaagtttcgtttttcgggtttacgttatttttttgttttagttttttaagtagttgggattataggcgttcgttattacgttcggttaattttttgtatttttagtagagatagggttttatcgttttagtcgggatggtttcgattttttgatttcgtgattcgttcgtttcggttttttaaagtgttgggattataggcgtgagttatcgcgttcggcgtattttcgtgttttttaaataggagagtattttttcggttttttaattgtttagagttagataataattataagttaaaatataaattatttagtgtatgttttaataataaatttaatagtaatttaaggttagaaagatgtgataattgaggttaagtgataaataaaataaggtggggttaaagtaggattttattgtttttgtagaatgaatttttttttttttatttttttttttaataaatattgagtatttattatgtattaggtattgagttgggtaataaattgatttgttatttattgtttattttatagatttgatttttagttaatttatttttttaagtttttttttttatgtttgtttttttttttagagttttttttttggttttaaattttttatttatattatatttttttaatttgttttgatgttttttttggtacgtagtataattattattttttatgtttttttgtaagtgtatgatatagtgtggggaaagtaataagattttttatttagatgataaaaatgtagattatataggttgtgttaaataatttttttttaattttatgtagaaaatttatttaaatattattaattataattattgattatttggaaaatattaaaggtagttggatatttttttaggtttataaattgatttatttggattggagtttgtgatatttattggtaatttgtttaaatattaagtttatttaatagatatatttatgattttataggtagaaataatattataatagtgtaatgatggtaggtattggttaaataaaaattatttattagatttatataatgaagtagtagaaattagttatattgtatttgtatttatatttttaagtaaaatattgaatttttttgataagtattatatttaaagtaaaaattttttgttattatttgtatggttaggtgttaattttttaaaaatattgtatagtaaatattttatattttttgtttgtttgttgttttttttttttttatttttttttttttttttttttttttttttttttttaagagagagagggttttgtttttttatgtaggttggagttgatgtgtagtggtgtgattatagtttattgtagttttaattttttgggtttaggtgattttttttattttagttttttaagtagttaggattataggtgtgtattattatgtttggttaatttttgtattttttatagagatagggttttgttatgttgtttaggttgaatttttaggtttaagtgatttttttgtttttttttaaagtgttgggattacgagtgtgagttattacgtttagttcgatttttttaatatgtatatttttttgagttttgtgtttaatgtttttttttttaagatttatatttttattttagaggatgtgatttatattttatagttttattatttttataaagatgattatagaaatttatatttttagttttggttttttttgttttgttgtaaatttttttttagatgtttattggatatttttgtttatatattttataattttaatttagtattgaattttttgtttatttttttaaatttatttatttttttaggttttttatttttgttaaaggtattaatattaagaatagaaagtgattttttttttgttttatttttattatttaaatgtttatattgtttttattttttttttaatatatattatttttttagtttaaaaataaaataaaatgagaaatataatttttgatgtttagagttatattatttaaaatggtagttttagttatatgtggttatttaaatttaaggtgattaaaattaaataaaattagttaggcgtagtggtttatgtttgtaattttagtattttgagaggttgtggcgggtggattatttgagttaggagtttaagattgggtttggttaatatggtaaattttttttttatanaaatataaaaaattagttgggtatggtggtaggtttttgtaattttagttatttgggagtttgaggtaggagaattatttgaatttaggaggtagaggttgtagtgagtcgagattatattattgtattttagtttgggcgattgagtgagattttgttttataaaaatagataaatatataaaattaaatttaaaatttgattttttagttatgttagttatatgttaagtgttttatggagttgtatgtggttaatagttattgtattgaatattgtagatatagaatatttttattattgaagaaagttttattaaatatttttgatttagaaattaatggtaaattatttaaattagtaatttaaattttttttaatatagatttagttttaatttatttgtgttaacgttattttttattaaaatttttatgtatgttttattataatttagtggggtttatagaattaagtttaaggttttataaagataagggaggtttatacgagttacgtggcgagggatttataggagggaaagaaagtaaagattttagagaggatagaaatag

SEQ ID NO: 187 - DNA, 13606 bp, Artificial Sequence
  chemically treated genomic DNA (Homo sapiens)
  unsure (4649, 7634, 7657)
gagttcgagattagtttggttaatatggtgaaattttatttttataaaaaataaaaaaaaattagttaggtatggtagtgggcgtttgtaattttagttatttgggaggttgaggtatgagaatcgtttgaattcgggaggcggaggttgtagtgagtcgagattatgtaattgtattttagtttgggtaatagagcgaggttttgttttaaaaaaaaaaaaaaaatggaattaattaagtttttatggtaaatagtggggggaggggttggggttttttaagatagtggtttttaagataagtatagggatttggggttatttgggaatatgttagaaatgtaaatttttaggttttattttaggtggattgaattagaagttttgggagtaaaatttagtaatttgagttttaataaggtttttgggattttgggaagtttgagatttattgttttaggttttcggtttttaataattagttttttaggagaatttagtttaagatttggggatatgttagttgggcgtggtggtttatttttgtaattttagtattttgggaggttgaggtaggcggattatttgaggttacgtattggatattagtttggttaatatggtgaaatttcgtttttataaaaaaatataaaaattagtcgggtgtggtgtgtgtttgtaattttagttgtttaggaggttgaggtaggagaattttttgaattgggaggtggaggttattatgagttaagattatatattgtattttagtttgggcgatagagtgagattttgttttaaaaaaaaaaaaaaaaaaaaagatttgggggtatgtttattttttttttttgtgttgttttattttaaagtttagttatagggcgtaattagatttagtttgatttagagtaaaaagtatttattgagtgttttttgtgtgtagattttggaaatgcgggtaaatggtataatagtagtaggttaatgagtagttgagattttaaagaggagtggaaggtattgggtgaggggagagtgaaagaaagaaaaggttagaattttatttgtttattttttttttattttatttatttttttttttgtttcgaggtttttattagaataaatgattgtggtttaaattgttttgaggttggaggtagaaattaagtttttatttatttttgttggttatggggattttaagttagttaatagttataggtttttgattttttatgagtaattaaaagaagatgaggattatgtatataggtatatataaatattttttgcgattttagatgttagggtagggagattaagagaaggaatgaagttttagaaggttggaagttttttgggtaaaatgagtttagtagataataagtaggaaaagttttttaataggggagggcggggttatttttggtttattttatttttttgagatttagaaattgtggttagaggaaataaagggtttttaaggtaaattataaaagtttttgagaatgaaatttgagtttggaaagagagtagagaatgagggatggatattagatttaaagggtttttttatataggtaaatgggggttagggggttgggagggatgtgagttatgtttagtttttttttttgggttttttttttattataggtagtttttaggagtagaatttttgttattgttttagtttgagtagttgatttttggtttttttttgttttattttttgaggaataagtttttttttgatttttatagagtttttttttttgtttttttgtaaggttttttttttgtgtttgaaaggttttgggtttaaggagtagatagttttgtaggtttaattgtagtgatttatattggtttttttttaggttttgggtgcgggggttgagattttaagataggaatttgggaatttggtataggtttatagatgatgatattaggtagataggttgtaaaagtggtattgagggattggattttgaggtaggggatgttataggattatgtttttattttgttatttgagggttttttatggataagagattagaagagattaaatgtaaaaatatttgagtagtgattttttggagaggagttagtggtttttgataggtttagtttttattaatgagatttgggagtggtttttgtttgttttttgtttttgttgaatttatattggtttgttgtaggggattggaaagatgatgtggaagaatgagttcggattttagttgatttattttagggaaacgaaggttgggtaaaagttagatatgtagaaatttacgtatttttaggtttaattataatatagagattttgtatttttttagatttaatggttttgagaaggatttagaaggagtttttaagattaattattatttataaagtttttattttaggattttggtaattgaatttttttttttagttattagttttttggaatagagaaggtagtttttgaaataggtgtttttttttttttttattataagttatagtgtttaggatgattattgtttttagattgtgtgatttgttttggtaaggaaattttattgtggggggaggaaatgaggtagtcgtgatataaagtgatggatgagttttttgtttagtagagagagagagaaagtcggtaggttgtgtagaattgagtggtttttgggtttaaagggtttttttttggttaagttttattttaaagtttaggaagtttatagtttggcgttatggaagagagataaaatcgtagtatttttttttttttttttttggatattattatttttgttttgatttagattatcgttggttttttttattgttttttagttttgtttttgtgatgtagagtataaatgtattttatgtattgggatttttttttagttttttgagtagtttaattttaagggattagttttatatagggtagagtatagattttgagtattatatattgtagttttgttttttagggtttcggttaaatttgattatcgaggaggtggtatcgattggtagatagttatttttagtgtattttattttatttattgtattgattttgtatattgtagttttttgttttatattgtagttgttgtttgttttttgtgagtttagattgaatataggttcgtttattgtatggaggtttcgtacgttgtagttttaattttttattatagttgttattgtatattataggttttttttatttatggtatgtttttaatattattattgtattttgtacgttataggttttattttagttgttttttttatttttatggttttagggattttaagagaggtattttttttttcgttaagtattacgaattttagtattttttgtgaaagaagtggttttaatagtattgaggatgtaggtggttgagattaagatatgagtaagggtagtttaatttgggtaagttgtggtttagaattttatattcgttaagtgattttgtttagtataaattgggcgattagtcgagtagttttttttaatatatatatatttatatatatatatatttatatatatatttttttttaagagtagattatgtagttagggttttattttgagagtcgtgggaaggttgtggttttcgttggtaaaattgggttaatgatagtaggggaatcggcggggttaggggggtgttggggtaattagggttcggtttggcgttaggagattttgagatgaaaggtgttttggcgttattgggttggttttatgtttatgaatgtaggtgtgtggtgtgtgtatgtgtgtgttgggggtggggttggtatggtggagattttttttttgggttgggttagggggtttatttgtatgtagtttatcgttttttttagattgattttggtattatttggatttttgtgggagtaaatatggggggaaatattattattcgggagttaggaattgagggggtatggtagattttgtttttttttcgagtttaggagagggagtagattgttgggggaaatggttggtgatagagaatagaaagagtttatatggagaagggtgacgttggaaaagggaggtagtggatcggtattgatgttagaaatgagaggggagggaggtaatagggaatgaatttttataaggatgaaaaacgtaagatgattgaagttaaaaggatattaggggttatttgtttagttttcgtagttgaagtttgaggaagttttgttttcgatagtagtggcgatttgttaaggttatatagtgagttatcggcggagaagggattcgaatttttaaataaattatatttgtaagcgtttggtgtttagatttttttttcgatgtataaggtataggttgttcgtcgatatttttttttttatttttacggtgtatattcgaaaattttttaattttttcggtaagtaaaggttattttttaatgatattttttttaaaatatgttattaagtatttatttttgcgggagtcgttcgggttggggagggcgagttcgagcggggcggggtagaggcggtcgaggggcggtcgggtttttggcgggggtttcggggcgcggtagggggcggggggcgggggcggncggcggcgaggcggtttgtagggagtagtcgcgagtcggtcgggcgcgtcgagttcgagttttagtcggagcggggcgggggagggaggagttagagcggtcgtcgtttttgtcggaggagtcgcggggtcgttatattcgtttttcgtttttttcgggtttattggtatttatattcgggcgtaggaggcgggcggttcgggttttatcggttttttatggacgtttttagtacggggcgttgagattttcgcgtcgttgtttatttcggttcggcgcgttacgtcgaggtaaggaggagggagcgagggggtattaatatgtaaatgttttgcgattgattatgtaaagtcgcggggtttcgtggttagtttttaggcgggttaggggcgtttagggggtgtttgttgttagttttagttttttttggcgttttagtgattttgttacgagttcgggagtttgtaattgacgttttggggaagggaggtgttgttaggaggtcgttgggtttcggggttcgtaggcggagatggcgttcgagtttttttttggagggttcgttcggtttttgttcggttagtttgttgcgtattttcgggtcgggtttcgttgtcggtcgtcggagttttttcgttcgtcgcgtcgcggtttgtttacggtgcgtcggaggtttgtttttttagtttttatttttagtttatgaggttcgagtggtttttgtaaagttgtttttagttgcggagggtagtatgagtgcggtggcgcgggtgggtttgtacgggttcggggagagggaagttttttcgttttattcgtttttcggttgagtatggttgtttggttgtaatattgttaattgtaaaaacgcggttgttgggggggaatgtgtgtgtggaaggggtgtatttggtggtgtttagatgattaggagagttgttggttggggaggagagggagaaatggatttgtgtgtgtgtattttattttgtttttttttttttgtaacgtgtttttggtgttttttttttatttggggtttttttttgtttagcgtgaaagaaaggtttggggggatgataggggtaattgaaagaattatcgttttaggggtgggggtgggggatatagaaggaaagttagtgaggtgggagtttgttttttagtgttggttttggttttaggagggggaggggatgaagggggttgttgtttaaaatgaggggggaagtaaaagtgatacgtagatatagagatatgtttatatagatagttatatgtatatttagggatatttaggtagatttaaggataggagttattggatatatttatatggggataagggaagagataggttgttgttgtatcgtggagttttgaggggtgggatatatttatgggagattaagagtatggggatcgatttatgtatatatttacgtatagggttatacgtagatgttgttatatattggggtaaggaggagttgttgttatttatatataaaaagttattgttatatgtatgtatgtatatagagtaattgtatatagtagtataattataaaagattttgttatttataggtatatacgtgttcgtatgagtttagttatatagatattattgtttgtcgtgatagtcgttgttatttagttagatgtaaatatagttatatattaatatatgtatatataatttagtaataagtatttttttggattttttattgtggagttttgaggttttgtaggtaataaaatttttgtttttaagaatattaaatttggttgtatgaaaaagtgtttttgcgtaatggtgtaaagtatgtatttttaatgatacgtttttggtttttatcgtttgagatattattttattagatagtgagtttttggagatttgggagaattatttaaagagttttggattttacgtagagtttagtataagggttgttttgtaaatatttgttagttgattgattgtggaatttgtagatataggtgtatttatttgtatatggttttttgaatttaggtgtagaacgagtttataaggtttaggtttttatagttgtaggtttatattaatagtcgtgtttatataattttagatgtatataattgtagtttgtgtagtcgagtatatatttagatgtatataattataaattttttttttttagtttttttttttttttttttttttaggtttagttattgtgcgggaatgggttgtttttttttttttttttttttttttagagggatagagaaataagagtaaagatagtgggtttaggggggttttagagggtcgagttatgggtttaaagtagtgtttagtgatttttagaagttaggatttttttgattgttggggaaggggagagttgtttttttttttattttaaaagtttaggggtgtttaattgtttttgttttgagttatttgtttgggttttttttgggaatagttagttatttttagttgagtttttgcgttttattttgagtttggtttttttttttatttgtatttttttgtttaaatttggaagttttttttaagaggttatcggttggcgagtgtttgtgtgagtgatatgtatttttgatttggaatttttttttaattttgtttttttgttgttttgttttgtagtgtttgattttttttttttttttttttgtttttttgttagtttgtaatttttttttattttgttgttattttcgatttatttttgtttttgttttagagttggggattggtagtaatgttttttatatttttttagttgttaatatttaagtttcgtttttttgttttttttgcgtagtttttggggttagtttgaggttggggtggggggcggggggtttagttggttgtttaggattttttgtatttttttagtgtcgtagttgtggttagtaagttttaggggttgggaatgggggaggggggggggttanttattgtttatgttgattttttnggtttgtatgtttggagatattagttttgtgggtatttttagggtgtaggttgtagttagttagtagtttttaaataagttatgaagaggttttttttatattggtttaagttggaaaagaatcgtttttatgggtagtggcgggagttggtaggattttgttgagttgggtttattgtagggtttataatggtttttttttatatttttggtagttgaggtttattttagagatgtttaatagttgtgttttttttgtttagttttagggtttggttttgagggtatagttgtttagattaagtatgtattaagcgaggtttttttattcgtgagtgtaggttttagtttagaaggggtattttttttggagagggaatttgaggagggggaatttaggtaggagatatcgagttcgggggtattaagtatttttcgttatgtttttttttagttttggattatttggaggtggaggtatttggtagagaatttatagggtagttatagaggggaaagattgaggtttggttttagggaatatatagttggatgaaagaataaggtattgggtcgggtatagtggtttatattcgtaattttagtatattgggaggcggaggtaggtagattatttgaggttaggagtttaagattagtttgattaagatggtgaaattttatttttattaaaaatataaaatttagttgggtgtggtggcggggttttgtaattttagttatttaggaggttgaggtaggagaatcgtttgaatttaggaggtggagattgtagtgagttgagattgtattattgtattatagtttgggtgatagagcgagatttcgttttaaaaaaaaaaaaaaaaagaataaggtattatttattaagtaggtgatatattattatagttgagaatagagatgatggtgatgattatgacggttatgattgatttggattgtttaggtttgaattttagttttgttatttgttggatgtgtgattttgagtaagcgatttaattttttcgttgttttatttgtaaattggggatgattatatttattttatttagtttttttgaggaaaaatgtttttaaaagtgtttagtttataataaattgtatatgtgagcggttgtgatgggtgaaggaagttgtgggtttggggttttttagattttttagagaagtttcgtggagaattgggttttttagatattagtgagattggggtttggggtagtgggtttttaatttttagtttttttatcgttatgtaattttttttttttagacgaatttttgtagcgtggaattagtgtatggtatttaaagatttaaggtaggtttttttgttttatttttttttgattttcgttttttagtttataaggagtttttggttttttagtttgggatatattttattagttaggggtatttgtataaatttttgggtattattgtatttttgtttagggtttgagttttgggggtgggagagagagaataaggaaagtcgtttttttttttatgtgtgggtttaaagaggaggtagtgtttttttttttttttgggagtttagtattggttaattaggatttagttttggttgataggtattagatttttttgttttttatggagtggtatttagtgtgaaaggtggtggtagagagaaattgaagtattgagtaatgattagtgtggtgggtatagtattttgagatttagtatttgttttgggttgtttttttgtttttgtgagtttggtgattaggattttttttttaaattttttttatttagttttgttttttaaggtgaaggaaggataatgggaggatattttgtaggggtgacgggaagtttttggagtgggaattaattttaattttagttttcggttgggtatagtggtttatgtttgtaattttaatattttgggaggttaaggcgggaggattatttgaggttagtagtttatgattagtttggttaatatagtgagattttatttttaaaaataattttaaaaagttagttaggtgtggtggcgtatgtttgtgttattagttatttgggaggttgaggtcggaggatcgtttaagtttggaaggtcgaggttgcggtgagttgtgattgtgttattgtattttagtttgaataatagagtgagattttttatatatatatttttttaaaatagatagaaaataaaataaaaattttaattttagtttttatggttgtaaaggtgtttaggggattttggagaattgttgtgttttttggggagggaggtaagtatgatcgtggtgggaagattattggttgggagttgggacgtttggttgttgatatttattagtcgtatgattttgggtttgggtttttattatttagagataatggtttttgttttatttaggttgagggtaaataatataaggtgggatgatttttgtgtttaatttatgttgtattttggtatggtgagtaatgtttgtggatttttttttttttttagggtttggtatatgttagggtggggtatatatatgttgtttggaattagagatagtttttagttttttattgaagtatttggggttggtgtgtggtgggggtatatgtggttttattttggtgttatttggtaggttaaagttggggttatagggatttttttttcggtatgttattgcgtgaggtggtttagagggagggttagaagtttgttgggtagataagggaagtaagatgggtgttattggtgtttaggaaatattatttttgtttcgttgttttgggggtgggtattaaaggttgatattaaagttttagttatgttttttagtagtggttaagagtagaatgattggattaagtttttggtttattttttttttttttttttttttttttttaaagaagatatcggtttttggtttttagagttttagttgtttgttttttttttttttttattaggtatgggggtggggaaataggggaatcgaggttttggtgtttttcggtatttttgtatatattagtgagtgggtgtgttgtgtacgtatttatgtgagagtgtttttgtgtatgtgtgggttggggagggttttgaatattttttggaacggtatttagagttttgtggttttgcgtatgcggggtgagtgtgtgtgtttgtacgtgttcgtgtgtgtgtcggagatttagttgtatttacgcgcgcgttttttttttttttttttttttttttttttttttttttttttttttttttttttttttttttttttttttttttttttttttttttttttttttttttttttttttttttttttttttatttttatatatataattttaatttttttttttttttttttttttttttttttttttttatttttttttttttttttttttgtttttgtttttttgtttttgtttttgtttttttttttttgtttttgttagttttgtttggttaggggttagttttagtttttggggtgtttgggagaatatttttttttttttttttttttttattattttttttttttttaggttatgttttttagggtttgtaggtaattttttttattgttttagatgagggagtgaggagggaggattttaagttttgtgtttatggtgttatttgtagtaagtgttttggtttcgtgatatttatgtttttagtatttagttgttttagtttttagttttaattattcgttggttgttgggggagggtggggagaatgtgtcgtgtttagtttgggggtgtttttgtttttgtttttttggttatttggattttttgtttttatttttgaggggaattgggtagggggggcgtgaagttttgtgggttgataaggaggggttgagttttttagtatgggtgtgggtatgattatttattagtggttatgggggatggatgtgatttgggaggagatttttagatttgggtatttattttgatgtttggttggagttggttcgggtaggaggagggagaggagagtagtaggtgggtgaggttatgggggagtcgagtgggaagtagtttttgatgttaatattgggtatttggtttaagttaaggttgttgtttatgtttttttgtttttgatttgtagggggggttttttgttatatttttttggggcggggtggggaggattttttgtttaagtaattaattttttttttatgaggatttttattttattttttattttttagtttttaaggttttatagtggttaggtgatgagttattgttttttagttttagaatttgttttttgggggtttagtgagagtttattaaggggtgtcgtttttttttttttcgttttttttatgtttgttaggttggggttttgagtttgtgtgtatttttttgttatattatatttgttaaatagtattttttttttcgtttttatttttttttttttttttggtattaggataatagagagttgggtggggtagttttgtttaatttatatttgagaatagaatagggggtatgggaaaggatagggagtttcggttttagagaggtttttgttttttagtatgggggtatatgtcgttgttgtagtattgttattattatagatttttaggggtttttggtgtgggtggttgtttgtggtgttcgtgttggtatgggggggtagtgttgtttatagacgtttgtgtttatgtatgtttatttatgtgtttgggttacggtgtttcgttttgttgttggttttgtttaattttttgatttatttttttttttttttttattttggttgtttattagtttttgggggtggggttagggggtttaggggtgaggttttttatgtagtagttacgtgatagaggttgaggtcgtatgttggggagttgtattttttgttttttttttattcgttatatttgtttgtgtgtatatagatagtaagttataggtttgtagtttagggttagaggtgtaatgtcgtaggaatggtgggttcggtttggtattgttttggattttaggtagtagaataaggttagtattagggttaggttgtgaggtttattttatagttatttgtttattagttgtgtgaatttgagtgaatgattaagttttttgagatttagtttttttatttgtgaagttttcgtgttttttttggagggtatagattttttttttagttaatatgtgttagttttttttttttttttttttgttattttggtcgatagtagtttagttaaattaattgagaagtttggttttttgtttgggaagtgggattcgagattttgcgtgggaagttttggagtttttgaggggttagagttggggattataatttggttggtagtatgggaggttagttttttatagtttttaatatttttttttattaaggtataaagatgggtatttatgtttattgcgtgtcgttttatgttttattttttttttatagatattttttttgtttatgttgaaaattgtttgtttttggtttttttttgtttttataatatagatgagttttaggaaagtttttttagaggggtggtaataatagttagtgtttaatagttgtttattaagggttaggtatttgtttgaatatgaagattgagatatattatttagtatatgaatgattttattttttttttttatttttttttatgtttggggtttaggaggtggatttttaatttcgtttgttgtatttgttatttaagggattattttggttttttttttatgtttgttttttttgttttttgttgttttgttatgggattttaaagttttaaatgttgttattaaagggattttatttatttttttatcgtgatatttttttatttttgttttttttttttttttatagg

SEQ ID NO: 188 - DNA, 13606 bp, Artificial Sequence
  chemically treated genomic DNA (Homo sapiens)
  unsure (5950, 5973, 8958)
tttgtggagagaagagagaggtaggggtaagaaggtgttacggtaggaaggtgggtaggatttttttggtggtaatatttggggttttgggattttataataagatagtagggggtaggaagggtaggtatagagaggggattaggatgattttttagataataggtatagtaggcgagattggagatttattttttaagttttagatatgggaaggaatggagggagagaatgagattatttatgtattaagtaatatgttttagtttttatatttagataaatgtttggtttttaatgagtaattattaaatattagttattgttattatttttttagaaaagtttttttgaaatttatttgtattataggggtaagaggggattagagataagtagtttttagtataggtagggagggtatttgtgaaggaaggatgggatatagagcggtacgtagtgagtatgaatgtttatttttgtgttttaatagagagagatgttgaaagttgtagggaattgattttttatgttgttagttaagttatgatttttaattttggttttttagggattttagagttttttacgtaaggtttcgaattttattttttaggtagaggattagattttttagttggtttagttgagttgttatcgattaggatggtaagggggaaaggaaaggaaattaatatatattaattggagagagaatttgtattttttaaagagggtacgagaattttatagatgaggaaattgagttttagaaagtttggttatttatttaagtttatataattagtaagtaggtggttgtgggataagttttatagtttggttttaatgttagttttgttttgttatttggagtttagggtagtgttaagtcgggtttattatttttacggtattgtatttttgattttgggttgtagatttgtggtttattgtttgtgtgtatataggtaggtgtggcgggtaggagggggataaagggtatagttttttaatatacgattttaatttttgttacgtggttgttgtataggagattttatttttaggttttttggttttatttttaggagttgataagtagttagggtgggaagagagagggagataagttaggggattgggtagggttagtagtagaacggggtatcgtggtttagatatataaatgggtatgtatgggtataggcgtttatgggtagtattgtttttttatgttaatacgggtattataggtagttatttatattaagggtttttgggagtttgtggtggtggtagtgttgtagtagcgatatgtgtttttatgttgaggggtagaggtttttttaggatcgggattttttgtttttttttatattttttgttttatttttaggtatggattgagtagggttgttttatttaattttttgttattttagtgttaggaaggagaggaggagtgaaggcgggaaggaaggtattatttggtaggtgtgatgtggtagaggagtatatatagatttagggttttagtttggtaggtatgggggagacgggaggaggggaggcggtattttttggtgagtttttattgggtttttaggagataggttttggagttggggggtagtgatttattatttagttattgtgggattttagaggttagagaatgggagatggggtggggatttttataagggggagattggttatttaaataaaggattttttttatttcgttttaaaagaatataataggaaattttttttgtaggttagagatagaaagatataaatagtagttttgatttgggttagatgtttagtattaatattaaagattgttttttattcggtttttttatagttttatttatttgttgtttttttttttttttttttgttcgggttagttttagttaggtattaaggtgggtgtttaggtttggaggtttttttttaggttatatttattttttatgattattggtgggtggttatgtttatatttatgttggagaatttagtttttttttattagtttatagaattttacgttttttttgtttaattttttttaggaatggaggtaggagatttaagtagttaagaaagtagaagtaggagtatttttaagttgggtacggtatattttttttatttttttttagtagttagcgggtaattggagttgggagttggggtagttgaatgttggaggtatgaatgttacggggttaaggtatttgttgtagatggtattatgggtataaggtttggggttttttttttttatttttttatttaaggtagtagaagaagttgtttgtaagttttgaagagtatggtttaggaggggagggaatggtggagggggaaagaaagggagggatgtttttttaggtattttagaggttggagttagtttttaattaagtagaattggtagaggtagagagagagagatagagatagagatagagagatagggatagaaagggaggagggagggaataggaaggagggaggaagggggagggaagagagaaagattgagattgtgtgtgtgagagtgagagagggagggagagaaggagggagagagagagagggggagggggagagagagagggagagggaagaggaagggagggagggagagagagagggagggagagagggagggagagagcgcgcgcgtgaatgtagttgagttttcggtatatatacggatacgtgtagatatatatatttatttcgtatgcgtagagttatagggttttgggtatcgttttaggagatatttagagttttttttagtttatatatgtataaaaatatttttatatggatgcgtgtataatatatttatttattgatgtgtataaaaatgtcgaaagatattaaagtttcggtttttttgtttttttatttttatgtttggtaaaagagaaaaagaaataggtagttggggttttgggagttaagagtcgatgttttttttagaagaggaaaagaggaggaggaggaggtgggttaggggtttggtttaattattttgtttttggttattgttgaggggtatggttgaggttttggtattaatttttaatgtttatttttaaaatagcgaagtaaggatagtattttttgggtattagtaatatttattttgttttttttgtttatttagtaaatttttgattttttttttggattattttacgtaatggtatatcggaggggaggtttttatgattttagttttggtttgttaagtgatattaaggtggaattatatgtgtttttattatatattagttttagatattttagtgagagattgagaattgtttttggttttaggtagtatgtgtatgttttattttggtatgtgttaggttttgggaaaaaaggagaatttataggtattgtttattatgttaggatgtaatatggattgaatataggggttattttattttgtgttatttgtttttaatttgagtgagataggaattattgtttttagataatgaaaatttaggtttaaagttatacgattagtgaatgttaatagttaggcgttttaatttttagttagtgatttttttattacggttatgtttgtttttttttttaagagatataatagttttttaaagttttttagatatttttgtagttatgagaattagagttggggtttttgttttgttttttgtttgttttgagaggatgtgtgtgtggggggttttattttgttgtttaggttagagtgtagtggtataattatagtttatcgtagtttcgattttttaggtttaagcgatttttcggttttagttttttaagtagttggtaatataggtatgcgttattatatttggttaattttttaaagttgtttttagagatggggttttattatgttgattaggttgattatgaattattggttttaagtgattttttcgttttggttttttaaaatattgagattataggtatgagttattgtgtttagtcgagaattagagttgagattggtttttattttaaaggtttttcgttatttttatagggtatttttttattgttttttttttattttgaggggtagggttaaataaaaggggtttggagaggggattttgattattagatttataaaggtaaagaggtaatttaggatagatgttggattttaaagtgttgtgtttattatattggttattatttagtgttttagtttttttttgttattattttttatattaagtattattttatggagggtaggggaatttggtgtttattagttagagttgggttttggttgattaatgttgggtttttaggagggaggaagggtattgttttttttttgagtttatatataagagaggggacggttttttttgtttttttttttttatttttagagtttagattttgaatagagatgtagtgatgtttaaagatttatgtaggtgtttttagttggtggggtgtgttttaggttgaggggttaagggttttttgtaagttgaagggcgagggttaaaggagggtggggtagaggggtttgttttgggtttttgggtgttatatattaattttacgttgtaaaaattcgtttgggaggaaaagattatatgacggtgagaaggttggaaattggagatttattgttttaggttttagttttattgatgtttaggagatttaattttttacgaagtttttttaagaaatttgggagattttaggtttatagttttttttatttattataatcgtttatatatatagtttgttatgaattaagtatttttaaaaatatttttttttaaaaaagttaaatgaggtagatatgattatttttaatttatagatgaggtaacggggaagttaaatcgtttgtttaaagttatatatttagtaagtgatagagttgggatttagatttaggtagtttaggttaattatggtcgttatgattattattattatttttgtttttagttgtgatggtatattatttgtttgatagataatgttttgttttttttttttttttttttgagacggagtttcgttttgttatttaggttgtagtgtagtggtataattttagtttattgtaatttttattttttgggtttaagcgatttttttgttttagttttttgagtagttgggattataggatttcgttattatatttagttaagttttgtatttttagtagagatggggttttattattttggttagattggttttgaatttttgattttaggtgatttgtttgttttcgttttttagtgtgttaggattacgggtgtgagttattgtgttcggtttaatgttttgtttttttatttagttatgtgttttttgagattaagttttagttttttttttttgtagttgttttgtgggttttttgttaagtgtttttatttttaaatagtttaaggttagaggggagtatagcgagaagtgtttggtgttttcgggttcgatgttttttgtttgagttttttttttttaaattttttttttagaagaggtattttttttaggttggaatttgtatttacgggtgggagggtttcgtttagtatatatttagtttaggtagttgtgtttttagaattaggttttgaggttgggtaaaaaggatatagttgttgggtatttttgaggtgggttttagttgttaggggtgtggagaaaggttattgtgagttttgtagtggatttaatttagtagggttttgttagttttcgttattgtttatgggggcggtttttttttagtttgggttagtgtggggggagtttttttatggtttgtttaagagttgttagttggttgtagtttgtattttgagggtgtttatagaattggtgtttttagatatgtaggttngaggggttagtatgggtagtggntgattttttttttttttttatttttagtttttaaaatttgttggttatagttgcggtattaaggaagtgtaggaagttttgagtagttagttgagtttttcgttttttattttaattttaagttgattttagaggttgcgtagggggggtagaggggcggagtttgggtattaataattggaaaagtatgaagaatattgttgttagtttttagttttgagataaggataggggtagatcgggggtagtaatagggtgagagagagttatagattggtagagaaataaggagagagagagggagaattagatattgtaagatagagtaatagagagatagagttagagagaaattttaagttaaaagtatatattatttatatagatattcgttagtcgatggttttttaaggaaagtttttaagtttggataggagggtataggtgggaaaaagggttagatttaaggtggggcgtaggaatttagttggaggtgattgattgtttttaggaaagatttaggtaaatgatttagagtaggggtagttagatatttttgagtttttagggtagggaggagagtagttttttttttttttaatagttaagagaattttagtttttagaagttattggatattgttttgagtttatgattcggttttttggaatttttttgaatttattgtttttgtttttgtttttttgtttttttaaaagaaagaaagaaaaaaaaaaaatagtttattttcgtatagtggttgagtttagaggaaaaaggggaggaggaagttgaaggggaaaaatttgtgattgtgtgtatttaagtgtgtgttcggttgtataggttgtagttgtgtgtatttggggttgtgtggatacgattgttggtgtggatttgtaattgtggggatttgggttttgtgaattcgttttgtatttgagtttaggggattatgtgtaaatgagtgtatttgtgtttgtaggttttatagttaattaattaataagtatttatagagtagtttttgtgttaggttttgcgtgggatttagagttttttaagtgatttttttaggtttttaagagtttattgtttagtagggtggtattttaagcgatagagattaagaacgtgttattgggaatgtatgttttatattattacgtaggaatatttttttatatagttaaatttaatatttttgggagtaagggttttgttgtttatagaattttagagttttatagtaaagagtttaggaaaatatttgttgttaagttgtgtatatatgtgttggtgtgtaattgtgtttgtatttgattgagtgatagcgattgttacggtaagtaatgatgtttgtgtgattgggtttatgcgagtacgtgtgtgtttgtgagtgatagggttttttgtaattgtgttgttgtgtgtaattgttttgtgtgtatgtatgtatgtgatagtgattttttatgtgtgggtgatagtaatttttttttgttttagtgtgtgatagtatttacgtgtgattttgtgcgtgggtatgtgtatggatcggtttttatgtttttggttttttatgggtatattttattttttagagttttacggtgtagtagtagtttgtttttttttttgtttttatgtgggtgtgtttagtagtttttgtttttgagtttgtttgggtgtttttggatgtgtatgtggttgtttgtgtggatatatttttgtgtttgcgtgttatttttgtttttttttttattttggataatagttttttttatttttttttttttttggagttaaagttagtattgaggggtaggtttttattttattggttttttttttgtgttttttatttttatttttggaacggtggtttttttaattgtttttgttatttttttaggttttttttttacgttggataagggagggttttagatggagaaggggtattagagatacgttgtaaggggagggaaataaggtggggtatatatatataggtttattttttttttttttttttagttagtaatttttttaattatttaggtattattaagtatattttttttatatatatatttttttttaataatcgcgtttttgtaattagtagtgttgtaattagatagttatgtttaatcgggaggcgggtgaggcgggggaattttttttttttcggattcgtgtaagtttattcgcgttatcgtatttatattgtttttcgtagttggaggtagttttgtaaaggttattcgggttttataggttaggggtgggggttgggggggtaggttttcggcgtatcgtaaataaatcgcggcgcggcgggcgggggagtttcggcggtcggtaacggggttcggttcgggaatgcgtagtagattggtcggatagaggtcgggcgggttttttagggggaggttcggacgttattttcgtttgcgaatttcggggtttagcgattttttagtaatattttttttttttagggcgttagttgtaagttttcgggttcgtgatagggttattggggcgttaggaaaggttgaggttggtagtaggtattttttgggcgtttttagttcgtttgggagttggttacggagtttcgcggttttgtataattaatcgtaaggtatttgtatattaatgttttttcgtttttttttttttatttcggcgtggcgcgtcggatcgggatgggtagcgacgcgggggttttagcgtttcgtgttgggggcgtttatggggggtcggtggggttcgggtcgttcgttttttgcgttcgggtgtgagtgttagtgagttcggggggggcggggggcgagtgtggcggtttcgcggttttttcggtagaggcggcggtcgttttggtttttttttttttcgtttcgtttcggttggggttcgggttcggcgcgttcggtcggttcgcggttgttttttgtaggtcgtttcgtcgtcgntcgttttcgtttttcgttttttgtcgcgtttcgggattttcgttagaggttcggtcgtttttcggtcgtttttgtttcgtttcgttcggattcgttttttttagttcgggcggttttcgtaggagtgggtatttggtgatatattttggaaaagatgttattaaaaaatagtttttgtttgtcgggagaattggggggttttcgggtgtgtatcgtgagggtggaggaggaagtatcgacgagtagtttgtattttatatatcggggagaaagtttaaatattaaacgtttgtaggtgtagtttgtttgggagttcgggtttttttttcgtcggtaatttattgtgtgattttgataaatcgttattgttgtcgggggtagagtttttttaagttttagttgcgagggttgggtaggtgatttttgatgtttttttaattttaattattttacgttttttatttttgtgggggtttattttttgttatttttttttttttttatttttaatattaatatcgatttattgttttttttttttaacgttatttttttttatataggttttttttattttttgttattagttattttttttaataatttgtttttttttttgagttcggggaggggataagatttgttatatttttttaatttttagttttcgggtggtggtatttttttttatgtttgtttttataaaaatttaaatggtattagagttaatttaaggaagacggtgggttgtatataaatggattttttaatttaatttaaaggagaggtttttattatgttagttttatttttagtatatatatatatatattatatatttgtatttatggatataaaattaatttagtgacgttagagtattttttattttaggattttttagcgttaggtcgagttttaattattttagtatttttttggtttcgtcggtttttttgttgttattagtttagttttattagcgggggttatagtttttttacggtttttagggtggggttttggttatatagtttgtttttggggaggggtgtgtgtgtgagtgtgtgtgtgtgtaagtgtgtgtgtgttagggggagttgttcggttaatcgtttagtttatattgggtagagttatttggcgagtgtgggattttgagttatagtttatttaagttgggttgtttttgtttatgttttagttttagttatttgtatttttagtgttgttggaattattttttttatagggggtattggagttcgtaatgtttggcggaggggagggtattttttttggggtttttggaattatggagatgagaagagtagttgggatgaaatttatggcgtgtagagtgtagtggtggtgttgagggtatgttatgggtgaagggagtttgtggtgtgtagtggtagttgtaatggggaattgaggttgtagcgtacggagtttttatgtagtaagcgaatttgtgtttagtttgggtttataggagataagtaatagttgtagtgtggggtaggaggttgtagtgtgtagagttagtgtagtgagtggaatgaggtgtattgagggtggttgtttgttagtcgatgttattttttcggtgattaggtttggtcggaattttggggagtaaggttgtagtatgtagtgtttagggtttgtattttattttgtatggaattagttttttggaattgggttgtttaaggagttgggagggaattttaatgtatgagatatatttatattttgtattataaaggtagaattaggaggtagtggggagggttagcggtaatttggattagggtaggagtgatggtgtttagagggggaggaaggaaggtgttacggttttgttttttttttatggcgttaagttgtggattttttgggttttggggtgggatttggttaaggggaagttttttggatttaagagttatttagttttgtatagtttgtcggttttttttttttttttgttaagtaaaaggtttatttattattttgtgttacgattgttttattttttttttttataataggatttttttgttagggtaaattatataatttggaagtagtggttattttaaatattgtggtttatagtgggagagagggaaagtatttattttagaagttgttttttttgttttagaaggttggtagttggaaggagggatttagttgttagggttttgaggtaaggattttgtaaatggtaattaattttgagggttttttttggattttttttagaattattgagtttaaagaaatatagggtttttatattatagttaagtttgggagtacgtggatttttgtatatttgatttttatttagttttcgtttttttgaaataaattagttgaaattcgaatttatttttttatattatttttttagttttttgtagtagattagtgtaggtttagtaagaatagggagtaggtagaaattatttttaaattttattaatagagattgggtttgttagggattattggtttttttttaaggggttattgtttaggtgtttttgtatttgattttttttgattttttgtttataaaaagtttttaaatgataaagtgagaatatagttttatggtattttttgttttagggtttagttttttaatgttatttttgtagtttgtttgtttgatgttattatttgtagatttgtgttagatttttaggtttttattttgaaattttagttttcgtatttagggtttaggggagagttaatgtaggttattgtagttgagtttgtagggttgtttgttttttgagtttagagttttttaggtatagagagaaagttttgtagagaagtaaaagaaagggttttgtgagaattagagaaaagtttattttttaaaaaatgaagtagggagaggttaggagttagttgtttagattgagatagtaataggagttttgtttttgagaattgtttgtgatggagagaaggtttaaggagaggggttgggtatggtttatattttttttaattttttaatttttatttgtttgtgtaagggaattttttggatttggtgtttattttttattttttattttttttttaggtttaggttttatttttaggagtttttgtgatttgttttagggattttttgttttttttggttatagtttttgggttttaggaaggtggagtaggttagggatgatttcgtttttttttattgaaagattttttttgtttgttatttgttaaatttattttatttagggaatttttaattttttgggattttatttttttttttggtttttttattttagtatttgagatcgtagggagtgtttgtgtgtgtttgtgtgtatggtttttatttttttttagttatttatgggaagttaagagtttatggttgttaattaatttggggtttttatggttagtaaaaatagataagggtttaatttttatttttagttttaaaataatttaagttataattatttgttttaataggagtttcgggataggaagaaaagtaggtaagatggagaaaggataaataaataaaattttaatttttttttttttttattttttttttatttagtattttttatttttttttgagattttagttatttattagtttattattgttgtgttatttgttcgtatttttagaatttgtatataggaggtatttaataaatgttttttattttgagttaaattaaatttgattacgttttgtggttggattttgagatgaagtagtataaagggggaaggtagatatgtttttagatttttttttttttttttttttttgagatagggttttattttgtcgtttaggttggagtgtagtgtgtgattttggtttatggtaatttttattttttagtttaaggaatttttttgttttagttttttgagtagttgggattataggtatatattatattcggttaatttttgtatttttttgtagagacggggttttattatgttgattaggttggtgtttaatgcgtggttttaagtgattcgtttgttttagttttttaaagtgttgggattatagggatgagttattacgtttagttgatatgtttttagattttgggttagatttttttagaggattgattgttagggatcgaagatttaaagtagtgggttttaggttttttagaattttaagggttttgttaaaatttagattgttgggttttgtttttagagtttttgatttaatttatttgggatggggtttgggaatttgtatttttaatatgtttttaggtgattttagatttttatgtttattttgagaattattgttttagagaattttagtttttttttttattgtttattatgaggatttgattggttttattttttttttttttttgagatagggtttcgttttgttgtttaggttggagtgtagttgtatgatttcggtttattataattttcgtttttcgggtttaagcgatttttatgttttagttttttaggtagttgggattataggcgtttattattatgtttggttaatttttttttattttttgtagagatggggttttattatgttggttaggttggtttcgaattt

SEQ ID NO: 189 - DNA, 5134 bp, Artificial Sequence
  chemically treated genomic DNA (Homo sapiens)
  unsure (30, 33, 37, 42, 45, 47, 49, 53, 56..57, 315, 422, 1807, 2267)
  unsure (2611, 2623, 2734, 2746, 2763, 2782, 3189, 3733, 4673)
ttttttttttttttttacgcggattttgantgntagngtcgnatngngngggnaannaatgtttcgtgtttgttttaaaatgcgttttgtgttgtggggtgcgttttttgtggcggttttttcggtagttgagttaggagaattttttggattcgggaagtagaggttgtagtgagttgagatcgcgttattgtattttagtttgggtaatagagtaagatttagttttaaaaaaaaatgtggttttattgtttttttttttttttgggatagggttttattgttatttaggttggtatgtaatgatgtaatttntagtttattgtaatttttgttttttaggttgaagtaatttttatgttttaggttttcgagtagttggaattataggtgtttagttaatttttgtatttttttgtagnagatagggttttgtcgtgttggggaggttggttttgaatttttggttttaagtgatatatttgtttcggttttttaaagtattgttttttaggaatagtgatcgtattttatatttagtagcggatggggaacgtttttttgtttattttatttttttatgttaattataggggggggttttacgggtttgggtatggatggttgagtaagaaaggttaggtttggtcgattgagtcgtggatttttttcggattttttttgtttttagtagtttttgtagtaaggggttttgggtatttgtttttgagtagggaggtttataaagtgtttggtgtttgggaaatgtttttcgaggtttaggtggtgtagtatagtttttttttatttttagtattttgaattattggtatatgtttaaggatatttaatgcggttacggggaggttatattagtatttttaatttttatttgtgagtaggtttttaaggttttttttgtttttagtcggataatttatcggttgggatagtattgattttttagtttttgtagggtataaatatgaggtttcgtaagatttttttttttaatagagtgtgtttttttttttcgtttatgttcggttgtttttttttgttttagaagttttcgttttagtattttagggtttttaagatgtttttagatttatggtttagaggtatattagcgatcgttgtgtttttagttagttggtagttttaaggggagatgaggttttttaaacgaatttagttaatgttattatgggtattatttttatagtagttacgattaggggaggttaggtggttcggtggtttacgtttgtaattttagtattttgggagtttgaggtaggtggattatttgaagttagaagtttgagattagtttggttaatatggtaaaattttatttttattgaaaataaaaattagtcgagcgtggtggtgtgtatttgtaattttagttatttgggaggttgaggtaggagaattgtttaagtttgggaggtggaggttgtagtgagtcgagatcgtattattgtattttagtttagcgatagagtaagattttattttaaaaaaattaaaaaaggaggagttgatttgcgttgagagggtgcgattttgattataggaggttattgtatagttaaaggtatagaggtgaggaggaaggaatgaaaggttagtttgtaaatgttggtaggttttatggttgatatatagaggtgaggttgggaggttgggttggaggaggaggggcggtgaatgtcgggttaatatttttatattttatgtagaaagtaataaggaattattttgaggtagtttggagaattaaaaaaagaaaaaaaanaaatagaggttgggcgcggtggtttacgtttgtaattttagtattttgggaggcggaggcgggattacgaggttaggagtttaagattagtttgattaatatgatgaaattttatttttattaaaaatataaaaattaattaggtatggtgacgcgcgtttgtaattttagttatttaggaggttgaagtaggagaatagtttgaattagggaggtagaggttgtagtgagtcgggattatgttattgtattttagtttgggcgatagagtgagattttattttaaaaaaaaaaaaaaaaaaattaatagaaaatgttggatacggtggttttcgtttgtaattttagtattttgggaggttaagataggtagattatttgagtttaggagttttagattagtttgggtaatatggcgaaatattatttttacgaaaaatatgaaaaattaatcgggtantggtggtggatatttgtagttttagttattcgggaggttaaggtaggagaatcgtttgagtttaggaagtagagattgtagtgagttaagattgcgttattgtattttagtttgagagagtaaaattttgttttaaaaaaaaaaaaataaaatattgggcgtggtggtttatatttgtaattttagtattttgggaggttgaggcgggtgaattatttgaggttaggagttcgagattattttggttaatatggtgaaatttcgtttttattaaaaatataaaaattagttgggtatggtggcgggcgttcgtaattttagttattcgggaggttgaggtaggnagaatcgttggnaattcgggaggtggaggttgtagcgagttgagattttattattgtattttagtttgggtgataatagcgagattttattttaaaaaaaaaaaaaaaaaaaagtaataaggnaattagattttngaagaaagggtttaaanattattatgagaaatgggnaagttagggtagttttatggtaaggtttgaggttaaatgttatttgattttttttatttatttattgttttatttttaataagttatttagtttttgagatttagttttttgattggtagaaggtatttatttaggttcggtatagtggtttatatttgtaattttagtattttgggaggtcgaggcgggtggattatttgaggttaggagtttaagattagtttgtttaatatggcgaaattttatttttattaaaaatataaaaattggttaggcgtagtggtttatgtttgtaaatttagtattttgggaggttaaggggggcggattatgaggttaggagttggagattattttggttaatatagtgaaattttatttttattaaaaatataaaaaaattagntcgggtatggttgcgggcgtatgtagttttagttatttaggaggttgaggtcggagaatggcgtgaattttggaagaagaggttgtagtgagtttagatcgcgttattgtattttagtttgggcgatagagcgagattttgttttaaaagaaaaaaaaaaaaaattagttaggtatgtagtattagttatagtgtgtttgtaattttagttattcgggaggttgaggtaggagaattatttgaattcgggaggtagaggttgtagtgagtcgagattatgttattgtattttagtttgggtgattgagcgagattgtgttttaaaaaaagaaggtatgtatttaaattataaggttaaaagagataaagtatgcgagtaaaataaagtaagttagttagtgtgggttgttttttttttttagtgaaggagttttttgttagaggtttttggatttgtttaatttgtatttggaaaggttattatttgtaggatttttatagttatatttggtatattttgtgattattattattatttttgttngttattatttatgattatgattatataatgggttttttttttttttttttttttttttttgagttatcgtattcggtttgtatgtttttaatttttataattttaatgtaaatattagttgttttgaattttttagtttgtgttatataagtatagatttaaaaatattgtgtaattttagattaaggtttagaattttgttttttaattttttgcgggtttatggatttttttttttttttttttttttttttttgagattaagttttggtttatcgtttaattttttaggttggagtataaatggtatgatttcgggttattgtaatttttattttttgggtttaagcgatttttttgttttagtttttttagtagttgggattatagaggtatattattacgttcggttaatttttgtatttttagtagaaacggggttttattatgttggttaggttggtttcgaatttttgatttcgtgattcgttaaaagtgttaggattataggtgtgagtcgttacgtttggtagggtttacggatattattagtatagttaggattttaattttttttattttgaaaattaggttaataaaaatttttaggagaaggtaaaatatattatggtgtttaagtattggggatttggtacgtattaggcgttttgtatgtttataggagtgttttagacggtttttaagttttttttttggaattttaatttaataaatgagttaatttcgttttagttttttagtttttttttgtaatttatttatttttgtagatattttgttttaaggaattttgtttgggaaatttatattagatatatttattatggcgtttatagtcgtatgggcgtgcgtttttttgtttatatggttagagtttcgtttcgtttcgtttttttaaatttggtgggcggatcgaggncggggttttatattaggttttatttcgattagttacgtttatcgttttgatttttaggtttttttagtttttgggcgtacgtgtcggattttttttacgagggggcgggttgcggttaaatttttcgttaggttagcggtcgggcgttgattggttttatggcggcggggtcggttcgtgattggttagtacgtcgtggtttaaagcggtcggcgcgggaattaggggtttattgcgggacggttttggagagtattcgggttcgtgaatttttcggaggcgtaatgagttgtattaatttgtttattgtgttgtttggtttttttagtaagattcgggggtagatttaggtgcgggggttagttttgcgcgtggttggggatgaggtggtcgtggtgatagtttgtgtttacgtattcgcgtagggcgggtttttaaatgattttatttttttttttagg

SEQ ID NO: 190 - DNA, 5134 bp, Artificial Sequence
  chemically treated genomic DNA (Homo sapiens)
  unsure (462, 1402, 1946, 2353, 2372, 2389, 2401, 2512, 2524, 2868)
  unsure (3328, 4713, 4820, 5078..5079, 5082, 5086, 5088, 5090, 5093)
  unsure (5098, 5102, 5105)
tttagaggagagggtgaggttatttgagggttcgttttgcgcggatgcgtggatataggttattattacgattattttatttttagttacgcgtagggttggttttcgtatttggatttgttttcgggttttgttgggggagttaggtagtatagtgggtaggttaatgtagtttattgcgttttcgggaagtttacgaattcgagtattttttaaggtcgtttcgtagtaagtttttggttttcgcgtcgatcgttttaaattacggcgtgttggttaattacgagtcggtttcgtcgttatggggttaattagcgttcggtcgttgatttggcgggagatttggtcgtagttcgttttttcgtgggaggaattcggtacgtgcgtttagggattgggagggtttggaaattagggcgatggacgtggttgatcggggtggggtttggtatgaagtttcgntttcggttcgtttattaagtttaaaggggcggagcgaggcggggttttggttatataaatagagggacgtacgtttatgcggttgtagacgttatgatggatgtgtttggtgtgggttttttaagtaaggttttttggaataagatgtttgtagaggtaggtggattgtagggagggattaaggggttggggcggagttagtttatttattagattggaattttaagaaggaagtttagaagtcgtttagagtatttttgtgggtatgtagagcgtttagtgcgtgttaggtttttagtgtttgagtattatggtgtattttatttttttttaaggatttttgttaatttggtttttaggataaagaaaattgaagttttgattatgttaataatattcgtagattttgttaggcgtggcggtttatatttgtaattttagtatttttggcggattacgaggttaggagttcgagattagtttggttaatatggtgaaatttcgtttttattaaaaatataaaaattagtcgggcgtggtgatgtatttttgtaattttagttattggggaggttgagataggagaatcgtttgaatttagaaggtggaggttgtagtgattcgagattatgttatttgtattttagtttggaaggttgggcgatagattaagatttagttttaaaaaaaaaaaaaaaaaaaaaaaaaaaaatttatagattcgtaggaggttaggggataaagttttggattttgatttgaggttatataatgtttttgggtttgtgtttatgtggtataggttgaaggatttagaatagttggtatttatattggggttgtgaaggttagaaatatataggtcgggtgcggtggtttaaaaaaaaaaagaaagaaagaaaagaaatttattgtataattatgattataaataatagtnaataaagatggtggtagtgattatagagtgtgttaggtgtggttgtaaggattttataggtaataatttttttaggtatagattggatagatttaaggatttttgataaagagtttttttattgggaggaagaagtaatttatattgattggtttgttttattttattcgtatgttttattttttttaattttgtgatttggatatatgttttttttttttgagatatagtttcgtttagttatttaggttggagtgtagtggtatgatttcggtttattgtaatttttatttttcgggtttaagtgatttttttgttttagtttttcgagtggttgggattataggtatattgtagttggtattatatgtttggttaatttttttttttttttttttgagatagagtttcgttttatcgtttaggttggagtgtagtggcgcgatttgggtttattgtaatttttttttttagggtttacgttatttttcggttttagttttttgagtagttgggattatatgcgttcgtaattatgttcggnttaatttttttgtatttttagtagagatggggttttattgtgttagttaggatggtttttaatttttgattttatgattcgttttttttggttttttaaagtgttgggtttataggtatgagttattgcgtttggttaatttttgtatttttaatagagatggggtttcgttatgttggatagattggttttgaatttttggttttaagtgatttattcgtttcggttttttaaagtgttgagattataggtgtgagttattgtgtcgggtttggatagatattttttattagttaggaaattgaattttagagattaagtaatttgttgaggataaaatagtaagtaagtgagggaggttagatggtatttgattttaggttttgttatgaggttgttttgatttntttattttttatgatggtntttgagttttttttttnaaaatttggttnttttgttatttttttttttttttttttttgagatggagtttcgttgttgttatttaggttagagtgtaatggtgggattttagttcgttgtaatttttatttttcgagttnttagcgattttntttgttttagtttttcgagtagttgagattacgggcgttcgttattatgtttagttaatttttgtatttttagtagagacggagttttattatgttggttaggatggtttcgaatttttgattttaggtgatttattcgttttagttttttaaagtgttgggattataggtgtgagttattacgtttagtgttttgtttttttttttttgaaatagggttttgtttttttaggttggagtgtaatggcgtaattttggtttattataatttttgttttttgggtttaagcgatttttttgttttagtttttcgaatagttaggattataggtgtttattattantgttcggttgattttttatatttttcgtagagatagtgtttcgttatattgtttagattggtttggaatttttggatttaagtgatttgtttattttggttttttaaagtgttgggattataggcgagagttatcgtgtttagtattttttgttggtttttttttttttttttttgagatggggttttattttgtcgtttaggttggagtgtagtagtatgatttcggtttattgtaatttttgtttttttggtttaagttatttttttgttttagttttttgagtagttgggattataggcgcgcgttattatgtttggttaatttttgtatttttagtagaaatggggttttattatgttggttaggttgattttgaatttttgatttcgtgatttcgttttcgttttttaaagtgttgggattataggcgtgagttatcgcgtttagtttttgtttnttttttttttttttttaattttttaaattgttttagaatggttttttgttattttttgtataaagtgtgaaggtgttagttcgatatttatcgtttttttttttttagtttagttttttagttttatttttgtgtgttagttatagggtttgttagtatttgtaaattgattttttatttttttttttttatttttgtgtttttgattgtgtagtgattttttgtggttagaatcgtatttttttagcgtagattagtttttttttttttaatttttttgaggtagagttttgttttgtcgttaggttggagtgtagtggtgcgatttcggtttattgtaatttttattttttaggtttaagtaatttttttgttttagttttttaagtagttgggattataggtgtatattattacgttcggttagtttttgtttttagtagagatggggttttgttatgttggttaggttggttttaaatttttgattttaagtgatttatttgttttaggtttttaaagtgttaggattataggcgtgagttatcgggttatttggttttttttggtcgtaattgttgtgggagtggtgtttatgatggtattaattgaattcgtttgggggattttatttttttttaaggttgttagttggttaaaggtatagcggtcgttggtatatttttagattatggatttgagggtattttggagattttgggatattggggcgagggtttttaaggtagagaggagtagtcgggtatgggcgagggggaggggtatattttgttgagaaggaaagttttacggagttttatgtttgtgttttgtaggagttggagaattagtattgttttagtcgatgggttgttcgattgggagtagaggaagttttgaggatttatttatagataggaattgaaggtattagtgtgattttttcgtggtcgtattgggtgtttttaagtatgtgttagtgatttagaatgttgggggtgggggggggttgtgttgtattatttgggtttcgaggggtattttttaaatattaggtattttataaatttttttgtttaggggtaggtgtttaggattttttgttgtagggattattggaggtaggagaggttcgggggaggtttacggtttagtcgattaggtttggttttttttgtttagttatttatatttaggttcgtaaggtttttttttgtggttggtatagggaggtgaagtgaatagaggaacgttttttattcgttgttgaatgtggaatgcggttattatttttaaaaagtaatattttgggaggtcgaggtaggtatattatttgaggttaggagtttaagattagtttttttaatacggtaaaattttatttnttataaaaaaatataaaaattagttggatatttgtaattttagttattcgggaatttgaggtatgagaattgttttaatttgggaggtagaggttgtagtgagttgnagattatattattgtatgttagtttgggtaatagtgagattttgttttaaaaaaaaaaaaaagtaatgaagttatatttttttttgagattgagttttgttttgttgtttaggttggagtgtagtggcgcgattttagtttattgtaatttttgtttttcgggtttaagagatttttttgatttagttgtcggagaagtcgttataagaggcgtattttataatataaagcgtattttaaaataaatacgaagtattnnttntttntntnatncgatnttantanttaaggttcgcgtagggggagggaggaga

SEQ ID NO: 191 - DNA, 5610 bp, Artificial Sequence
  chemically treated genomic DNA (Homo sapiens)
tatattatagatttatttataagaagatagatggaattattttttttttttgaattttagaattttaaggaagttaatttgagtggtttagtttggattaagtgtttattttggtttaaataattgtagtagtatatttgtgtatttgtgtattttgtttttttataattttgtagttcggggaaagtgtgtagatggatgggtttttgaaaagtaagagttgtttagataacgttagaggtgtttagttttgggagataagagttgggttaggttgataattagtttaagagagtcggaattagatgaataagaattagattttgggtgataatttagattaagagttttgaggtttagttattttaaaaagtttaagttttattgttttttggttttttggttaagattatgtgtagtatttgtttttattagtttaatatttgatatattttttatttgaggataatataataaatagatttttggagtaaggagatggaataggagtttgttttgtttattttatatattggtttggattgtagtatttttaggaatggtgtattttttttattatttttaaaaagtttaagttttaagaggtagtttggaaaaaagtgtttttggatttatttatatttttttttttaagatggagtttcgttttgttatttaggttggagtgtagtggcgttattttggtttattgtaatttttgtttttaggatttaagtagtttttttgttttagttttttaagtagttgggattataggtgtgtgttaattatgtttagttaatttttttatttttagtagagatagggttttattatgttggttaggtaggttttaaagttttgattttaggtgatttgtttgttttggtttttcgaagtgttaagattataggcgtgagttattgcgttcggtttaatttttgtaattttagtagagacgagtttttattatgttgattaggttggtttcgaatttttgattttaggtgatttattttcgttttcggttttttaaagtgttggtattataggtatgagttatcgtttttggtcgggtttgtttatattttggagatgttgtatattatgtttttttttttaagagttacgtaagtatttatatatggaagattttgagaaggtatttgggaaaaaatttgtttaattgtaaatataataatgtatgtatttgtatgtggagttttttttttagtggattatttataaatcgtttattgtttttaatgtatattttggagatagatttatattattagtttttatttgttagttatttttataagggttgggatggtttatgagtgaatagttttgatttaaagtagtgttttttaaattttatttatttgtttatagtttttttggagtttgttttatatgttcgttttgtgtattatttttatatgtttttatgtaaattaattatttttttaaaaagttttattttagttatatttttaaaataatggttatttttttttatatatatcgaaatatatatttattagaattaaaatgtttgtttatgtattattaataatttttttaagtattatatggtggggatatgtgtttgaagtgttaggagttaggagtggtttttgtaagatagagtaagttagttaatttttgagtattgttagttatatatgttggtagagaagtttagtttgtgataagattgttcggatatttttatgtttgtgtacggggatgttttcggtttgttattgtgaagtttgtgttgtttttatgtttatttagttttttttggaggggtttggaaagtaaatgtaggttgggtatagtggtttatgtttgtaattttagtattttgggaggtaaaggtgggtagattacgaggttaggagtttgagattagtttgattaatatagtgaaattttgtttttattaaaattgtaaaaattagttgggtgtggtggtacgtggttgtaattttagttattcgggaggttgaggtaggataattgtttgaatttaggaggcggaggttgtagtaagtttagatggtattattgtattttagtttgggtgatagagattttattttaaaaaaaaaaaaaaaaagaaaaaaaagtaaatgtagattttttttgggaaacggggggttgggagagtggagtagtgtggatgtattgttatttttgaaggtcgtttttaaattattttggatttattgtagtaagtagatgttttattttttggttagggattgattttgagatgggaagagtatgagaagagatattaatagtaaggtaaaattggttttggtagtttgttttagagaaagagtatagttttggagttaggtcgatttgagtatgaatttaagatttagtatttattaggtgtttgtttttaaattattattttttgatagttattatatatttataatgattattatggagtggatgaggaaatagggatttagagaagttaaataatttgtttgatattatataggtaataaatagtagagtagaatttaaatttaagttgatttgatttttaaatgtgtgtttttaattaaagtagggtaatttgttttgatttgtttattttttgagtattttttttgtaggagggtttgttgttgggtgttgggaatttagtggtaggtaagatggataagattttttttttttatagattttgtttgttataggggaaatagataggaaattaattattatatttgtaatttaataataagtgttataagtgttataaaggagatagatattataaggtattttttatttttatttgtttatttattttttgagatttattcgttttgttgtttaggttggggtatagtggtgcggtttcggtttattgtaatttttgttttttaggtttaagcgatttttttgttttagtttttcgagtagttgggattataggtgtgaattattatattttgttaatttttgtatttttagtagagatagggttttattatgttggttaggttgttgttgaatttttgattttaagtgattgatttatattgattttttaaagtgttgtgattataggcgttagttatcgcgtttggtttataaggtatttttggttagttagtggaagtagggttagtagtgcgtcggagagttattttgaaaaagtgatatttaggttgattttgaagtatttataagatgtggtaaatatatttaatggtaaatatgtgatggtaaatattagatgtgataaagatattgatggtttattggatgaatagtttttatatttatttttaaatgattttatagatattattttatagataatatttaggatgaaggtaaataaaaaggagattaattaaaatatgaaataataatagtgaaagtggtaatagatgtggtaatatttataaaggagtaatggttagattagtatattgagaagattattttggtaattgttggaatgtagtttacgagagggttaagaatggaagtagtaatttttgttagaagtgtagtgttttggagtgcggtgttttttgttggtttgttttttgttttttttaaattaggttttattttgttgtttaggttggagtgtagtgtagtttcgatttttttttcgggtttaggtgatttttttattttagtttttcgagtagtcgggattataggtatatgttattatatttcgttagtttttgtatttttttgtagagttagggttttgttatgttgtttaggttggttttgaatttttgggtttaagtgatttgttagtttcggttttttaaagtgttaagattataagtgtgagatattatttttagttagtatattgtattaatttaagtaggagaacgtagattttaaaggtttatgggtagtagagagaagtagatgaagtaaagagatgtaattagcgggattagtgggaaatgagggaaaggaaggtgttaggatggggttttttttagttgagtggagtttagtttatttttagagaagtttgagaggtatttaattatagatgtaaggtagttggttgttggttttttgtttttaggatagtttgatttttgtaatataggcgattttatagagttattgtgagaatttagagttgggtatagaatagatgttttataaacggtagttttattttttatttgtttcgtttttttagtatgttagggatataggggcggatagagataggtttagttttttttggttttttgtattttttttttttttagtataatttttgggtttatagcggatgtttaataagtatttgtagaatgaattaaagaaattagatttttggtgatttagggttatatgtattcggcggaaaattggggttaaatcggatttttggttggttgaaaaattaaaataatttttaaaaagtgggcgtgaaataatttagaagttggagggtttggataaaggttggggaggggattttttttattaggcggttttagggtcggtttagtaagaaaggaggcgttggggagatttttggggttttagttgttaaggtattcgtcgttttaaggagatgcggacgtcggatattagttttgtttaagattgttgggtttcgtcgcggtttttaaaggtttattacgtggttgcgcggttagttttggttcggaggcggtgttcgggtggcgtttgcgtattgtttagtagaggggttggggtttcgagaaaaagcgtttggagaggaaggggaggttgtttggggtgggacgtcgtgggaggagtcggttttttatgtaaattatagcggagcgcgtacggttcggaggcggggtttgcgatgtaaagataggttcgtttggcgaatagcgagggggcgggtcgtaattttttgttttttttcgcgagcgttgacgtcgtcgacgtgttgtttaaaagcggtcgcgtaggcgtagtgagtttaaatgcgaatttaggttgttatataattgttggggtttgttttcgtcgttcgttcggtagttaggtagcgtcgtcgtcgtggtagtagttttagtcgtttttggagtttcgggtttatagttatcgtcgtttatttgcgttttttcgagttttcggagttttcgttcgttcgtataggtcggttcgtcgtttgcgttttttttacgtcgtttcgtttgtcgtcgcgttcgttttttcgggtcgatatgagtggggattatttttataacgatttttaggtacggttcggtttgattttggcggtttcggatttcggtttggtcgtttcgcgattttcggcgtaggtttcgattttagtttcggttcggtagttttgataggtcggagttttcggtgaggggtcgtttgtcggagtagatcggttcgttaggtcgcgagcgagggtcgcgaagttatagttcgaggtagggatggttgttttttgtggttattttcgggttttcgtttttttcgggggcgtagggtgagttagatttcggtcgcgcgcgttcgtcgtcggaggggttaaagtggttgttgtttgatattttttttttttttttttttaga

SEQ ID NO: 192 - DNA, 5610 bp, Artificial Sequence
  chemically treated genomic DNA (Homo sapiens)
tttggaaaaagaaaaggagagaatattaaataatagttattttaattttttcggcggcgagcgcgcgcggtcggggtttggtttattttgcgttttcggggaggacggggattcgggggtggttatagagggtagttatttttgtttcgaattgtaatttcgcggttttcgttcgcggtttagcgagtcgatttatttcggtaggcggttttttatcgggggtttcggtttgttaaagttgtcgggtcggggttggggtcggggtttgcgtcgggggtcgcgggacggttaggtcggggttcggggtcgttagggttaggtcgggtcgtatttgggaatcgttgtggaggtggtttttatttatgtcggttcggagggacgagcgcggcggtaggcgaggcggcgtgggggagacgtagacggcgaatcggtttgtgcgggcggacggggatttcggaggttcgaggaggcgtaggtaagcggcggtgattgtgggttcgagattttagaaacggttgaggttgttattacggcggcgacgttgtttgattgtcgggcgggcggcgagaatagattttagtagttgtgtaatagtttaagttcgtatttgggtttattgcgtttgcgcggtcgtttttaaataatacgtcggcgacgttagcgttcgcggaaagaggtagagggttgcggttcgttttttcgttgttcgttagacggatttgtttttgtatcgtaagtttcgttttcggatcgtgcgcgtttcgttgtgatttgtataaggagtcgattttttttacggcgttttattttaagtagttttttttttttttttagacgttttttttcggaattttagtttttttgttaggtagtgcgtaggcgttattcgggtatcgttttcggattagggttggtcgcgtagttacgtggtgggtttttaaaggtcgcggcgggatttagtaattttgggtagagttggtattcggcgttcgtatttttttggagcggcgagtattttggtagttgggattttagaggtttttttagcgtttttttttttgttaagtcgattttgaggtcgtttggtgggaggagttttttttttagtttttgtttaggttttttaatttttggattattttacgtttattttttaaaaattattttaattttttaattaattaagggttcggtttaattttagtttttcgtcgagtatatgtagttttgggttattaagggtttgatttttttggtttattttataaatatttattgagtattcgttatgagtttaggaattgtgttgagggaagggggaatgtaagagattaaagggaattgaatttgtttttattcgtttttgtatttttggtatgttgggaggacggggtaaatggggaatagaattatcgtttatagagtatttattttgtgtttagttttgaatttttataatagttttgtgaggtcgtttgtattataaaagttaaattgttttaaagataagggattaatagttagttattttgtatttatagttggatattttttaagtttttttgggaatgaattgaattttatttagttagaaaaagttttattttgatattttttttttttttattttttattagtttcgttgattgtatttttttgttttatttatttttttttgttgtttataagtttttgaagtttgcgtttttttgtttggattaatataatgtgttggttgggggtggtgttttatatttgtaattttagtattttgggaggtcgaggttggtagattatttgaatttaggagtttaagattagtttgggtaatatggtagaattttgattttataaaaaaatataaaaattggcggggtgtggtggtatgtgtttgtagtttcggttattcgggaggttgaggtgggaggattatttgagttcgaggaggaggtcgaggttgtattgtattttagtttgggtaatagagtgagatttggtttaaaaaaaataaaaaataaattaataaaaaatatcgtattttaaaatattatatttttaatagggattgttgtttttatttttggttttttcgtaaattgtattttaataattgttaaagtgatttttttaatatgttaatttaattattatttttttgtggatattgttatatttattattatttttattattattattttatattttaattgattttttttttatttatttttattttaagtgttatttgtgaaataatatttatgaaattatttggaagtaaatatgaaaattgtttatttagtggattattagtatttttattatatttaatgtttattattatatgtttattattagatgtgtttattatattttgtgaatgttttaagattaatttaaatattatttttttaaagtgatttttcggcgtattattgattttgtttttattggttgattaagggtgttttataggttaggcgcggtggttaacgtttgtaattatagtattttgggaggttaatgtggattaattatttgaggttaggagtttaataatagtttggttaatatggtgaaattttgtttttattaaaaatataaaaattagtagagtgtggtggtttatatttgtaattttagttattcgggaggttgaggtaggagaatcgtttgaatttgggaggtagaggttgtagtgagtcgagatcgtattattgtattttagtttgggtaatagagcgagtgagttttaaaaaataaataaataaataaaaataaaaggtgttttatagtatttattttttttgtaatatttatgatatttgttattaagttataaatgtagtaattggttttttgtttattttttttatagtaagtaaggtttgtgagaggggggaattttgtttattttgtttattattgaatttttagtatttagtaataggtttttttatagaagaggtgtttaagaaatgggtaaattaaagtaggttattttgttttggttaggagtatatatttggaagttaaattaatttaggtttgaattttgttttgttgtttgttatttgtgtgatattaggtaagttgtttaatttttttgagtttttgtttttttatttattttatggtgattattgtgggtatgtaatgattattaaaaaataatggtttgagggtaggtatttagtaagtgttgagttttggatttatatttaggtcggtttgattttaaagttatattttttttttgaagtaagttgttagagttagttttgttttgttgttggtgtttttttttatattttttttattttaggattaatttttggttagaagatgaggtatttgtttgttgtagtgagtttaagataatttgaggacggtttttaggaataataatgtatttatattattttatttttttaatttttcgttttttagggagaatttgtatttgtttttttttttttttttttttttttttgagatggagtttttgttatttaggttggagtgtagtggtgttatttgggtttattgtaattttcgttttttgggtttaagtaattattttgttttagtttttcgggtagttgggattatagttacgtattattatatttagttaatttttgtaattttagtagagataaggttttattatgttggttaggttggttttaaatttttgatttcgtgatttgtttatttttgttttttaaagtgttgggattataggtatgagttattgtatttagtttgtatttgttttttaggtttttttaaagaagattaggtaggtatgaaaatagtatagattttataatggtagatcgaggatattttcgtgtatagatatggaaatattcgggtagttttgttataggttgaatttttttgttagtatgtgtggttggtagtgtttagaggttgattgatttattttgttttatagagattatttttgatttttaatattttaaatatatgtttttattatatggtatttgaggagattattgatagtgtatggataagtattttaattttaatagatatgtatttcgatgtgtatgagaaaaaataattattgttttaaggatataattgggatgaggttttttaaaaaagtgattgatttatataaaaatatataggaatagtgtatagagcggatatataagataaattttaggaaggttataggtaaataaatgaggtttgggaaatattgttttaaattaagattgtttatttatggattattttaatttttataaaaataattagtaggtgaaaattggtagtgtaggtttgtttttaaagtatgtattgggaatagtggacggtttatagataatttattaaaagaagagttttatatataaatatatatattattatatttatagttaaataggtttttttttaggtgtttttttagggttttttatatgtaaatatttacgtgatttttgaaaagagggatatggtgtgtagtatttttaaaatgtaggtaaattcggttaggagcggtggtttatgtttgtagtgttagtattttgggaggtcgagggcgggggtggattatttgaggttaggagttcgagattagtttggttaatatggtgaaaattcgtttttattaaaattataaaaattaggtcgggcgtagtggtttacgtttgtaattttagtatttcgggaggttaaggtaggtagattatttgaggttaggattttgagatttgtttggttaatatggtgaaattttgtttttattaaaaatagaaaaattagttgagtatggttggtatatatttgtaattttagttatttgggagattgaggtaggagaattgtttgaattttggaggtagaggttatagtgagttaagatggcgttattgtattttagtttgggtgatagagcgagattttattttggaaaaaaaaatgtaggtaaatttaaaaatatttttttttagattattttttgagatttgggttttttgggggtggtagagagggtgtattatttttggaggtattgtaatttaggttaatgtgtagagtggatagagtaagtttttattttatttttttgttttaaaaatttatttattatattatttttagatagaggatgtattagatattaaattggtaagaatagatattgtatatgattttagttagaaggttaagaagtaatgagatttgagttttttgaaatgattgaattttaagatttttgatttaggttgttatttaagatttagtttttatttatttgatttcgatttttttaggttagttattaatttggtttaatttttgttttttagaattgaatatttttagcgttgtttaaataatttttgttttttagggatttatttatttgtatatttttttcggattgtaagattatggaggaataagatatataaatatatagatgtgttgttatagttgtttggattaggatgggtatttgatttaagttgagttatttaggttaatttttttaaggttttagaatttagaagaaaagagtggttttatttgtttttttgtggatagatttgtagtatg

SEQ ID NO: 193 - DNA, 6069 bp, Artificial Sequence
  chemically treated genomic DNA (Homo sapiens)
  unsure (4665)
atatatgatagattgtgtattttgttggtgaagggtaggtgtatgataatatttaatgttttttaaagtagaatttttttaaaataagatgtatttttgaaagtttatttaattattagatatttttataaaggttaagagtaatttttttaagatatatgttaattttattttttacgttgtatgaaaattttgaattattattgagaattttgaattattgagaattttgaatattattgagttatattatataagtgaaagtgttttttttgtttgtataattagaatgttattagaagattagtgtagtttatttgattaaaattaatttaaataaatttttgtaaaataaaaaattaaaataaatattgtattttgtaattattgtaggtagaaattgaagaattttatttgttgtttgtttttttagtggtaataatatttaggaatatgattattgatatttttagttattcgtaaatatttgttatttttggtgtttaaatattattttaaaagtaaaaatatatttataaattgtagtaattaaatagttagaagaagtagagttaataatgtattataatatttattagagaaatattgaaaattaaaaagttatattgatagtaattttttttttttgagtttatttttaaagaattataataaattaaattatatttaaatatataatagttattaattaggtaattatttattgagtttattataggttagatattaaaaattttttttagtttagtaattttgtatatcgtaaggatttataaaattaatgtaatgagaagggagaggtgaaattatagatattgaattttgaatttaaatgttagtttttttaaatgttttcgaggttaaagatttgtttttttttttttaattgaattttagtgttggaatgatatataatatttaaatggaaattattgaaattttggtagatatttagaagtatggttttgagttgttatttttttggataatttatttattgattaaattatttattgtgtataaagtgtgatgataggtgtggtttattaggtaaattgtttattttttatgtatatatatatttttgagatggagttttgttttgttgttcgggttggagtgtagtggtgtagttttggtgtattgtaattttcgtttttcgggtttaagcgatttttttgttttagtttttcgagtagttgggattataggtatatgtttagttaatttttgtatttttagtagagatgcggttttgttattttggtaaggttagttttgaatttttgattttaggtgatttgtttgttttggttttttaaagcgaggtaaattgtttattaaatagtaaatgaataaatataaaattgttttttaattaaatgattagtttgaaattataatttaagggtgaatttaaggtagaaaatgcgtttttattatttttttaaatttttaggttttgagtatttaatatagtaggtatttaattttttttttattgttataataaggaaatataagatttaaaaatagaaattttgaagtagttaggataagtttttatggaagttatttagaaattttgattaaataaagatttttatatagtttatagaaatgattaatttttagtttttttttttggttagtgtttgttgtggggtagaaattaagttattatatgtaatatatatatataaagtagtatttaaaattagataaatttgatatagaagtttttttttttttttttttgagatggagtttcgttttgtcgttaaggttagagtgtagtggtgcgatttcggtttattgtaatttttgttttttaggtttaagtgatttttttatgtttgtttttttagtagttggaattataggtataggttattacgtttggttaatttttgtatttttagtagagaaggggttttatgatgttcgttaggttggttttgaatttttgattttaggtgatttatttttaattgaaaattattttatattattttagaagagaaagttatgtttaagttgcgtataattaattttattataaagatatgttaagtttgttgtatagttaaaaaggataattttttagaagttgagatatttttaatttagatttcgttttttatttattataaatttttgttttaaaaatgttgatttttatgtatatttagtaatttttatttgtaatttttttgggtaagttagtatttttttaaaattagtaatatttattaaaaggtttttttatattgagaagataaaaggatttaatgttttatatatgaggtaagtgaaaagaatattatttttattaatttatttgagttttgaatatattgttttatttattttaaaatttgaatttaggttgggtgcggtggtttatgtttgtaattttagtattttgggaggttaagatgggcggtttatttgaggttaggagttcgagattagggtggttaatatggtgaaaatttcgtttttagtaaaagtaaaaaaaattagttaggtatggtggtcggtgtttgtaattttagttatttgggaggttgaggtaggagaattgtttgaatttgggaggtggagggtgtagtgagtcgagattatgttattgtattttagtttgggtgatagagtaagattttgtttttaaaaataataataaaaacggaagataaagagttttgataatttaagtttaaaaaaggagatagttatgtattttatagtttagtttttatttagtatatttttataaaaaaaatttattgtttttaaaattatttttttttaaataaaatatatgtgtatttggagatgtaaatttatagtaagaatataagattattttaataagtattaaattgaggtttagggaagttaaataataaggttatggatatttggttaggtttagaaaagtttgtattttaagtttaaggtaaagaaaggttttattgttttgaagtttttagtatggtaaagttatatggttattagagagttaattaaaaaaattatgtttaaattatttttatgttttagagttttttatttttagatttagaatgtagtttaaagatgtgatttgagatatttttgtttttttttgagaggaaatgtatagttggaagtttataaaaatatttttttaaaaaatagtaatattgtttttatttttataaaaagtttttattataattttttggtggtattttatgtttttaagtatttattttggtgatcgttggtttttttttagtttgttttataagttaggttataaatggtttgaaattaggggttttgtttttattttgaatttatcgtagagtttggtatagcgtggtagagtgtgcgtttaataaatatttgagtggaattatattgaaaaataggaagaagtaaagttattttttatttgttaaagattgtgatgttgttgtattggtaatttttatttttagaaagttttaatgtgaatgaaattattttttattgtgtatttgaaaattttattgaaaatagttttaaaaattaagtatgtttttttagaggtagggggtatagttttggatagatgagaaaagtgatagtgatatttttgtattgtttagagaagaaaggttaataaagagtagaaatagaatatttaatttattttgtattttttttttagaatattttttgtgtgttttttattatttaagttttttatatgtagtttttttgaaattgattatatgtttttttggggtgaggggaggagacggaagaaggagatggagaaggtttgagatgatttttttcgatagtagcgtttatttaggtttttggggaggtcgggttacggggtttttttgtattagtggtttataacgttttgtttgcggtttataatcgtttttttaaaataatttttttttgggacggttttcggtttttttttgttatttttatttttatttcgtttttatttttatttttagaggttttaggtaaacgtttcggattttcggttaggttttagagtaaatagtacgtttggaggattataatcgattcgaggttaattcgattttttttttttgtcgtttttaattgatttttgaagtagtttttgttttttttttaaatggaaaatttatagatatatatataaataaaaattttaagtttttttttcggttttattcgtaatgacgttttttttttcgggtttcgtttttttagggggtttggaattttgggattggtcgagaggttgtggcgataaggttcggattggatagtatggcgttgattgatagcgggggcggtcgtcgcgtttttttttttttttcggtgtgtaaatgtgtgtgtgcggtgttatgtcggataagagggaggtgatcgtggcggcggcggcggcggttttgtttattgtttttttcggtgtgtgtgtgtgaggaaatcggggttgtagcgaggttaaggttgtttttgaagtagcggcggcgatcgggacgattattttggcgattcgagtggttggttttcgcggagtgtgagaaggataaggtatttttgcgttttcgttacgttcgagcgtttcgggttttatcgcggttttcgcggttcgtnatcgcgttttagttcggtttgtagcggcgtcgggcgggcgagaaggtaacgtcgtcgttgcgtcgtcgtcggtcgttttttgttttttttttagtcgtcgcgttaggttcgggcggcggacgtcgcgtttcgagtttgagggtagtcggcgcgcggtttttttagcgggttcggttggacgttcgtttcggattttcgcgatggggcgcgggggtcggcgcggttaggagttcggcgagtggagcggtgggtgcgaatcggcggggtttagcggttcgtagggaggcgggagcggcggttgcggttttagggtttgtgagttggaggtattcgttatggttaagtcgggtggttgcggcgcgggagtcggcgtgggcggcggtaacggggtattgatttgggtggtaagtggttggttttcgggacgggcggttgtattgtttcgggttcgcggcgggggcggaatttcgaacgggcgggggaggggaaagggagggaaatttcgtttttcgaacgggcgttttataggggtttgtgtttgtagaattttttagttcgtttttcgcgttttttttttttttttttttttgtacgtttttggaagttttgattgttagagcgtaatgtgtatttgaaattttggggggataaaatcgcgaacgtaatatatagttttcgtttttttttttttttttttaattagattttttcggggtagtcgaatttgaaatggtggggatggcgataatgtaagtgtgtttgtgtggggtagtattttttttaaatgtagtttaagaaaattttgggaaaaggggtgtgtgtgtgtgtgtattttaaatgtagttttttttggggttttaattttaaagaagaatgtattgggatttttatagtaatttgtattttaatttggaaagttttatttaatgcgtttaattgagagcgtattggggatgatttttatagtagttaatattgtaggtcgtttttttgttagggtgagattattaaaagaagtgtttgtttacgttagtatcgtaggtgtaacggggtgagggttgaatggatgttttggagaggtgattgaagtgtttagttttgaagttaaaggatttcgacgtttagtttttgttgggaagtagaagtaattgtagcggaaggaggaagggagattggatttttacgatagatcgataattcgtcggtattttatttgtttagcgtagagtttagattagggttattttttatatagaaaatttaggtatttcggagaaaagtaaaaagtgttatatttttttggatttttgacggtttgttttttcgtttttgttttaaatattttaagggagtttttatataggtatttttgttatttagttcgttttttttttgtttgggtga

SEQ ID NO: 194 - DNA, 6069 bp, Artificial Sequence
  chemically treated genomic DNA (Homo sapiens)
  unsure (1405)
ttatttaaataaagagaaaacgaattaagtaataaaaatgtttatatgaaagtttttttgaggtatttaaaatagggacgggggaatagatcgttaaaagtttagaaaaatgtaatattttttattttttttcgaaatatttaggttttttgtataggaaatgattttggtttgaattttacgttgagtaagtgaaatgtcggcgaattatcgatttgtcgtgggaatttagttttttttttttttttcgttgtagttatttttattttttagtaagaattgagcgtcgaaattttttaattttaggattaagtattttagttatttttttaggatatttatttagtttttatttcgttatatttgcgatgttgacgtagataagtattttttttaataattttattttgatagagggacgatttatagtattaattgttgtgaaagttatttttaatgcgtttttaattgagcgtattgaatgaggttttttaaattgaagtgtaagttgttgtagaaattttaatgtatttttttttgagattaaagttttagaaagagttgtatttagaatatatatatatatatatttttttttttagggtttttttgaattatatttggagaaaatgttgttttatatagatatatttgtattatcgttatttttattattttaggttcggttgtttcggaagagtttggttaaaaagaaaagagaggaagcgggggttgtatgttacgttcgcggttttgtttttttaaagttttaagtatatattacgttttggtagttaggatttttagagacgtatagagaaagaaagaaagaaaaggcgcggggagcgggttggaggattttgtaagtataggtttttatggagcgttcgttcgggggacgggattttttttttttttttttttttcgttcgttcggaatttcgttttcgtcgcgggttcggaataatgtagtcgttcgtttcggggattagttatttattatttaggttagtgtttcgttgtcgtcgtttacgtcggttttcgcgtcgtagttattcgatttggttatggcgagtgtttttagtttataggttttgaggtcgtagtcgtcgttttcgtttttttgcgggtcgttgggtttcgtcggttcgtatttatcgttttattcgtcggatttttagtcgcgtcgattttcgcgttttatcgcgaagattcggagcggacgtttagtcgagttcgttgaggaggtcgcgcgtcggttgtttttaaattcgaggcgcggcgttcgtcgttcgggtttagcgcggcggttgaggagaaagtagggagcgatcggcggcggcgtagcggcggcgttgttttttcgttcgttcggcgtcgttgtaggtcgggttgaagcgcgatngcgagtcgcgagggtcgcggtggagttcgaggcgttcggacgtggcgaggacgtagaggtgttttgttttttttatatttcgcgaaggttagttattcgagtcgttagagtagtcgtttcggtcgtcgtcgttgttttaaaggtagttttagtttcgttgtagtttcgatttttttatatatatatatcgagagggataataaatagagtcgtcgtcgtcgtcgttacggttattttttttttgttcggtataatatcgtatatatatatttgtatatcggggagagagggagggcgcggcggtcgttttcgttgttagttagcgttatgttgtttaattcgggttttgtcgttatagtttttcggttaattttaaaattttaagttttttggaggggcgggattcgaggggggaaacgttattgcgggtagaatcgaaaggaagatttggggtttttgtttgtgtgtgtgtttgtgggttttttatttgaagggagagtaggggttgttttaagggttaattgagggcggtaaagggaaagggtcgaattggtttcgggtcgattgtaattttttaagcgtgttgtttattttgagatttaatcgggaattcgaagcgtttgtttggggtttttaaggatgaggatgggggcggggtggggatgggggtggtaggaagaagtcgggggtcgttttaaagggaaattattttaaaagagcggttgtaaatcgtaggtaagacgttgtagattattggtgtaaggaggtttcgtgattcggtttttttaagggtttaagtggacgttgttgtcgaaaaaaattattttagattttttttatttttttttttcgttttttttttttattttaaaagagtatatggttagttttaagaaaattatatatgaaaagtttaaatgataagggatatatagagaatgttttagggaaagaatgtagggtgggttgagtgttttatttttattttttgttgattttttttttttgaataatgtagagatgttattgttattttttttatttgtttagaattgtgttttttgtttttaagagggtatgtttaatttttaaaattgtttttagtggaatttttaaatgtatagtaaggaataattttatttatattaaagttttttaagaatgaaaattattaatatagtaatattatagtttttggtagatggaagatggttttatttttttttgttttttagtgtaattttatttaagtatttattgggcgtatattttgttacgttgtgttaggttttgcgatgggtttaaagtaaaaataaggtttttgattttaaattatttataatttggtttgtgagatagattaaaagggagttaacgattattaaaatgagtatttgaaggtatgaagtgttattaaagagttgtgatgaaagttttttataaagatgaaaatagtattattgttttttgaagaggtgtttttgtgaatttttaattgtgtatttttttttaagggaaaataaaaatgttttaggttatatttttaaattgtattttgagtttagaggtggagaattttgaaatatggaaataatttaaatatagtttttttaattagttttttgatggttatgtaattttgttatattagggattttagaatagtgaagtttttttttattttgaatttggggtgtaaatttttttgaatttgattaagtatttatagttttgttatttaatttttttgagttttagtttagtgtttgttaaaatgattttgtgtttttattgtgagtttgtatttttaagtatatatgtattttgtttgaaaaggggtaattttaaaggtaatgagttttttttatgaagatgtattaggtagaagttaagttataaaatatatagttgtttttttttttaaatttaagttgttaaagttttttatttttcgtttttgttgttgtttttagagatagagttttgttttgttatttaggttggagtatagtggtatgatttcggtttattgtattttttattttttaggtttaagtaatttttttgttttagttttttaggtagttgggattataggtatcggttattatgtttggttaattttttttatttttattagagacggggtttttattatgttggttattttggtttcgaatttttgattttaagtgagtcgtttattttggttttttaaaatgttgggattataggtatgagttatcgtatttagtttaggtttagattttgaaatgaataaaataatatatttaaaatttaaatagattaataaaaataatgttttttttatttgttttatatgtgaggtattgagtttttttgtttttttagtatgaaaaagttttttaataagtgttattagttttaagaaaatattgatttatttagaagaattgtaaataagaattgttgaatatatatgaaaattaatatttttaaagtagagatttgtgatgagtggaagacggaatttagattaaaagtattttagtttttaaagaattgttttttttaattgtgtagtagatttagtatatttttatgataaaattgattgtacgtaatttgagtatagtttttttttttggggtaatgtgaagtaatttttaattaggggtggattatttgaggttaggagtttaagattagtttgacgaatattatgaaattttttttttattaaaaatataaaaattagttaggcgtggtgatttgtgtttataattttagttattggggaggtagatataggagaattatttgaatttgggaggtagaggttgtagtgagtcgagatcgtattattgtattttagttttagcgatagagcgagattttattttaaaaaaaaaaaaaaaaaagtttttatattaggtttgtttagttttagatattattttgtatgtatatattatatataatgatttaatttttattttatagtaagtattgattaaaaggaaaaattagaaattagttatttttataaattgtataaaggtttttatttaattaagatttttgagtagtttttataggagtttattttaattattttagaatttttatttttagattttatatttttttattgtagtaatgaaaaaaaaattaaatgtttattgtgttaggtatttaggatttgggaatttaaaaaggtgatgaagacgtattttttgttttaagtttatttttgaattatagttttaagttaattatttaattgaaaagtaattttatatttatttatttgttgtttaataaataatttatttcgttttgggagattaaggtaggtagattatttgaggttaggagtttaagattagttttgttaagatggtaaaatcgtatttttattaaaaatataaaaattagttgggtatgtgtttgtaattttagttattcgggaggttgaggtaggagaatcgtttgaattcggaaggcggaggttgtagtgtattaagattgtattattgtattttaattcgggtaatagagtaagattttattttaaaaatatatatatatataaaaaataaataatttatttgatgagttatatttattattatattttatatatagtaggtaatttaattagtaagtaaattatttaagaaaatagtaatttaaaattatatttttaggtatttgttaaagttttaatagtttttatttaaatgttgtgtattattttaatattgagatttagttgggaggaggaggataaatttttaatttcgggagtatttaaagaagttaatatttgaatttaaaatttaatgtttataattttatttttttttttttattgtattaattttgtggatttttacgatatataaggttgttggattaagaaaaatttttaatgtttggtttatggtagatttagtaagtgattgtttagttaatgattattgtatgtttaaatgtaatttagtttgttatagttttttagaagtgagtttaaggaagaaaagttattattaatgtgattttttggtttttagtatttttttagtaaatattatagtatattattaattttgttttttttaattatttaattgttatagtttataagtatatttttatttttaaaatgatatttaagtattaaaagtaataagtgtttgcggatggttgaagatattaatgattatatttttgagtattattattattaggaagatagatagtaggtaaagttttttaatttttatttgtaataattatagggtatagtatttgttttgattttttgttttgtaggagtttgtttagattggttttggttaaataagttatattgattttttggtgatattttaattatatagatagaagggatatttttatttatatgatatagtttaataatatttagggtttttagtaatttagggtttttaataataatttagggtttttatataacgtggagaataaaattagtatgtgttttaagaaagttgtttttggtttttgtaaaaatgtttaataattggatggatttttaaagatgtattttgttttgagaaaattttgttttgggggatattagatgttattatgtatttgttttttattaataagatatataatttattatgtgt

SEQ ID NO: 195 - DNA, 6078 bp, Artificial Sequence
  chemically treated genomic DNA (Homo sapiens)
ataagtaagggtttggtgtggttgtttatatttgtaattttagtattttgggaggtcgaggtaggcgaattatttgagtttaggagttcgagattagtttggttaaaatggtaaaattttatttttattaaaaatataaaagttagttaggtatggtggggggtatttgtaattttagttatttaggaggttgaggtaggagaattgtttgaatttaggaggtagaggttatagtgagtcgatattgtgttattgtattttagtttgggtaatagagcgagatttcgttttaaaaaaaaaaaaaaaattaaaaaataaaatttatagaatgtttaatattaagagtgaattttgggtgataatgatgtattagtataggtttattaattgtaataatttatattattttggtgtgggatattgatagtgtgggatgtatgtgtgatatgggtattgtattttttgttaaattttgtcgtgaatttaaaattgttttgaaattaaagtttgtttagaaggaaaaatagttgagtatattatgtgtagaatattttaagatttggaatgggatatttaagggtagatttttgagattaagaatgaaatagaattggtatgaattgaagtttagttttgagaattttggtaggtagaaaattttagtttttaaaattggattaaggtgattttgggtttttagtgttttaggataaaatttttttttgaaggaagaaaatattgttattatagattattttagtaaagttttaaatatagtgtttagtacgtaattaaagataatgaggagataatgtgaatgagaattaaaaaaagtaagtgtttttaggggttttagaatgattagaaataggatttaaaataattatgttaattattgttaaggtatatagagaatgttaattgagaatttgaattgttaataaggatatagtaaatttgaaaaagattaatagaaattgtaggattgaaaaattataatatagattaagaattatatgggtcgggcgtggtggtttaagtttgtaattttaggattttgggaggtcgaggcgggtggattacgaggttaggagtttaagattagtttggttaatatggtgaaatttcgtttttattaaaaatataaaaaaataattagttaggtgtggtggtacgtgtttgtagttttagttatttagggaggttgaggtagagaattgtttgaatttgggaggtggaggttgtagtgagtcgagattgtgtcgttgtattttagttagggcgatagagcgagaatttgttttaaaaaaaaaaaaaaaagaattattgttgttttagtttattttagtttatttttcgatttttaatttagatgttatttatgtatttattttggaagttttttttgattaatttgtttggatgtaggtttttttaataattttttttatttattattagtagttttttttaaggttattgtatttttttttaatgtaatggttttattgagataattagtttatattgtttatttttttaaaatatataatttttagtatatttatatagttgtgtaattattattaattaattttagagtatttttattatttttaaaaggaattttgtatttattagtagttattttttattttttttttaattttttagttttagtaggaggttggagtagtagtttattaatgttgttttgaatattagtgtatatgtttttgttatatgttttatttttatttttagaaatagagtgtattagtttgtttttatattgttgtaaagagttgttttagattgggtaatttatgaagaaaagaggtttaattgatttataggtttgtaggtttaatcggaagtatgattggaagtttttaggaaatttataattatggattaaggtaaaggggaagttattattttttttatacgagagtaggagaaaaagattgtgaagcggaaagtattacgtatttttaagtaattagatttcgtgagaagttatttattatattgagaatagtaaggggaaaatttgtttttattatttatttattttttaagttttttttttaatattgggaataataattggatatgagatttgagtggggatatagagttaaattatattatagggttttattatgttgtttaggttagaatgtaattatagtttattgtaattttgaatttttggttttaaggtatttttttgttttggttttttaaagtgttgggattataggtatgtgttattgagtttggaatggatatatgtttttaattttttcgggtatatatttaggagtgaaatttttgggttttatggtgattttatgttttataattttgggaattgatagatagttttttaaaattttttttttttgagatagggttttgttgtgttgtttaggttatatagtgtattggtttataggtttgattatagtatagtatattgaggtttttatttcgtggttttaagggatttttttgttttagttttttaagtagttaggattataggttagtgttattatgtttagtttaaagtattttatatttttattaatagggtataagggttttaatttttttatagttttgttaatatttgttattttttgtttttttgaatatagtttttttagtgggtataaagtggtatttttttgttttttttttttttttttttttgagattgagtttcgttttgttatttagtaataagttggagtgtaatggtgtgattttagtttattgtagtttttttcgttttttaggtttaagcgatttttttgttttagtttttcgagtaattgggattataggtttgagttattaagtttggttagtttttgtatttttagtagagatggggttttattatattggttagtttggtttttaatttttgattttaagtgatttgttcgttttggttttttaaagtgttgggattataggtgtgaagtattacgtttgattgttttttttttttgagataaggttttattttgttgtttaggttggagtggagtgggatgattttggtatattgtaatatgttgtttaggttggttttgaatttttgggtttaagagatttgtttatttgggttttttaaagtgttgggattataggtgtgagttacggtgttcggtttttttgtgtgtgtgttttttggtttttttttttgagatggtgattaaaaaaatataataataaataataaataaaaaataaaacgaagttatttttttgtatgtgaatgtttagtagtggtagtattaattgttgaaaagattgtttttttattattgatttgttttggtgtttttgttgatgtaaatgtgagggttattgatttattttaggatttttaattttatttgtttatatttttattttttatgagtatgttcgtagggttattgtgtatgttagtagggttattgtgttttatagaagaaatttaagaagaattatttttttttttttttttattaaaagttatgtttattaatttagtattataattcgttttagaattttttatgtagttggaaagggaatatgggaagaggtgagtatgttggaaatgtagggtagtttttaaattgaggttttattttgtttgttttaaagttaaaaatatagggtttagtaaagaggagtttagaggttggagatgaaaataaaagtttttggtttagatggtaaaggaggtttttaagagtagtagaattagtatatttcgaaggtagtgttggaggtatttttatgaagtagggggtttttttttggtatttaagttttttttaatttttttaagttttttagttaggtttggtatgttatagttttgagttagatatattttaattacgttgtttaatgtaaatttaagtaggaattggagtatgatgttggtggggagggcgaggagggcgtaaagggttgttgtagttttgtaggtcggttagagtttgtttttttatgcgaggggagcggaatcgtttttttcgttatttttttttttttgagagggagttttatttttgtcgtttaggttgtagtgtaatggcgcggatttcggtttattgtaattttcgtttttcgggtttaagcgattttttagttttagtttttttagtagttgggattataggcgttagttattacgttcggttaatttttgttatttttagtagagacgtggttttatcgtgttggttaggttggtttcgaatttttgattttaggtgattcgttcgtttcggttttttaaagtgttgggattataggcgtgagttatagcgttttgttaagaagaattattttttaattttaatttaaagtaattaatttaagggttggaattatttattttttatttagaatttttagtagcggtttttagtattagtagtcgttaagattgtgttgggtcgttgtttttttgttgttttaaattacggttatgtgtttggtaagggtgttggttaatcgaaaatgttggttttagagttagaagtattggtatttaaataaatatatttgggggttgggggttgatgagtaaggttgggaggagataaaagaagtatttcggtttagtcgttagagacgcgtaaggtgtaacggagagagtaatttaggttgtgagagtggttttaaatattgagatatggagttaggatttttgtttttgggggatggttttagtattgatgcgtaggatttggtttttgaaggagttgataaaattgtcgtttattcgcgcgattatcggtaaagtagttttatagtttgtttttttttttggttgtttttttatttatttttcgttttgttttttttttttttttttttttttttttttttgcgcgaagcggaagtgacgcgaggcgtagcggaagttattgtagtcgcggtgttgtgttgtggggaagggagaaggatttgtaaatttcggagcgaggttttgtttattcgaggtcgttgttgtgcggagattttcgggtgaagttatcgttattatgtttgattaggtatcgggttgggagttatttaacggcggtggttagcggtttttttgtaggtttgtttgtcgttatggggttcggggatggaggcgcgggggaggggattcggaatgggggagggggcggtcggtggggattaggtaggcgacgtatacgatcgattacgtcggtagtgtcggggtttgttgcggggttttcgagcgttcgttttttttcgggttcgtttattattttcgtattttatcgtttttggtggcgttttttttatgtcgttttatttttttttttcgggtcgattaggtgtagagcgtcgtttttatttttttgggagggtttttggagaattcgttcgtttttttttagaggattaatcgtagaagtagggttttaggttttagttatgtaacgggagagaatttttgattgggaggtttcgtggttttgagaagcggttggattttttattttttgttttttcgtcgggagggcgtggggcggcgagggagggagacgttcgatgttgttgggaattttgttttcgttcggattggagttagggtaaggatgtcgttgtttttttttgagttttttttcgtgtgggggtgtagagttgtcgtttttttattgtattttttcgttttttattcgggattggtttattttagttttttagttgtaagagagtatttataataattaagaaagaaaatagaattaaattgttagagtaataaaaagtattttatttgggtattaatttgaggaagttttatatttttgaggaaaagtataggaaaattttgtgtatgtagagtcgttgtagaatatttgtagaaagttgtttggtaaggtaaagtgttttagtttattgttagtattaataatttatttgggatttgtatttaattaggagtgatcgattttttttttttttttttattttgttttaattaaataattttatggttagtttttaatttataaagtttttgtttggttttttgtt

SEQ ID NO: 196 - DNA, 6078 bp, Artificial Sequence
  chemically treated genomic DNA (Homo sapiens)
aataaaagattagataaaaattttatgaattaaaaattagttataaagttgtttaattagaataggatgaggaagaaaaggggaaatcgattatttttgattaagtgtaaattttaagtaaattattgatattaatagtgagttggagtattttgttttattaggtaattttttgtaaatattttgtaacgattttatatatataaagtttttttatgtttttttttaaaaatatgagatttttttaggttaatgtttaggtgagatgttttttgttgttttagtagtttagttttatttttttttttggttattatgaatgtttttttataattggagagttaggatgaattaatttcgagtaagaaacgggaaagtatagtaaagaggcgatagttttgtatttttatacggaaaaagatttagaggagagtagcggtatttttgttttagttttaattcgaacggaggtaggatttttaataatatcggacgtttttttttttcgtcgttttacgttttttcgacgaagaagtaaaaagtggagagtttagtcgttttttagggttacggagttttttagttagggattttttttcgttatataattaaggtttagggttttgtttttgcgattagttttttggaaggagacggacgggttttttagagatttttttagggaggtggaagcggcgttttgtatttagtcgattcgggagaaagaagtgggacgatatgagggaggcgttattaaaggcggtggggtacgggggtgatgagcgagttcggagaggggcgggcgttcgggagtttcgtagtaggtttcggtattgtcggcgtagtcggtcgtgtgcgtcgtttgtttagtttttatcggtcgtttttttttttatttcgggttttttttttcgcgtttttattttcgagttttatagcggtaggtagatttgtagggaagtcgttggttatcgtcgttggatggtttttagttcggtatttggttagatatgatgacggtggttttattcgggggttttcgtatagtagcggtttcgggtaagtagaatttcgtttcggggtttataaattttttttttttttttatagtataatatcgcggttgtagtaattttcgttacgtttcgcgttattttcgtttcgcgtagggaggagggagagagagaagagaggaaagataaggcgggaaatgggtgggggagtagttaaggggaggggtaggttgtggagttgttttgtcggtggtcgcgcgggtgaacggtagttttgttagtttttttaaggattaggttttgcgtattagtattagggttattttttaggagtaaaggttttggttttatgttttaatgtttggagttatttttataatttagattgtttttttcgttatattttgcgcgtttttgacgattgagtcgagatattttttttgtttttttttagttttgtttattaatttttaatttttaaatatgtttatttgaatgttagtatttttagttttagaattaatattttcggttaattagtatttttgttaaatatatgatcgtgatttaaaataataagaaagtaacgatttaatataattttgacggttattgatgttaaagatcgttgttgaaagttttaaatggggagtgagtaattttaatttttgaattggttgttttgagttaaggttaaagaatgattttttttggtagggcgttgtggtttacgtttataattttagtattttgggaggtcgaggcgggcggattatttgagattaggagttcgagattagtttggttaatacggtgaaattacgtttttattaaaaataataaaaattagtcgggcgtggtggttggcgtttataattttagttattagggaggttgaggttggagaatcgtttgaattcgggaggcggaggttgtagtgagtcgagattcgcgttattgtattgtagtttgggcgataagagtgaaatttttttttaaaaaaaaaaaggtggcggggggggcgatttcgtttttttcgtatggggaagtaggttttgatcggtttgtagagttgtagtagttttttgcgtttttttcgttttttttattaatattatgttttaatttttgtttggatttatattgggtaacgtggttggaatgtatttggtttagaattatgatatattaaatttggttaaaaaatttgaagaaattaaaaaggatttggatgttaagaagaaattttttattttatgagaatgtttttagtattgttttcgggatatattgattttattgtttttgagggttttttttattatttgaattaaaagtttttgtttttatttttagtttttgggtttttttttgttagattttgtgtttttggttttagagtaagtaaaatggggttttaatttgagaattattttatatttttaatatatttatttttttttatattttttttttaattgtatgggaggttttaagacgaattgtggtgttagattagtaaatatgatttttaatggaaaaaaaaaaaagaatgattttttttagattttttttgtaaaatataatggttttattggtatatatagtggttttacgggtatatttatggaggataagaatataaataaatagaattgagaattttgaaataaattaataatttttatatttatattaataaaaatattaagataaattaatggtgaaagaatagtttttttaatagttggtattattattgttggatatttatatgtaaaagaatgatttcgttttgttttttgtttgttgtttgttgttgtgtttttttggttattattttaaaaaaaaaaattaaaaaatatatatataaggaggtcgggtatcgtggtttatatttgtaattttagtattttgggaggtttaggtgggtagattttttgagtttaggagtttaagattagtttgggtaatatgttgtagtgtgttaagattattttattttattttagtttgggtaatagagtaagattttgttttaaaaaaaaaaaataattaggcgtggtgttttatatttgtaattttagtattttgggaggttaagacgggtagattatttgagattaggagttggagattaggttggttaatatggtgaaattttatttttattaaaaatgtaaaagttagttaggtttggtggtttaggtttgtaattttagttattcgggagattgaggtaggagaatcgtttgaatttgggaagcggaggaggttgtagtgagttgagattatattattgtattttagtttgttattgggtgatagagcgagatttagttttaaaaaaaaaaaaaaaaaaaaaataaggagatattattttatatttattagaagggttatgtttaaaaagatagaaaataataagtgttgataaggttatggagaaattagaatttttatattttgttagtaggaatataaaatgttttaggttaggtatggtggtattggtttatagttttagttatttgggaggttgaggtagaaggattttttgaggttacgaggtggaagttttagtgtgttatgttatgattaagtttgtgagttaatgtattatatagtttggataatatagtaagattttgttttaaaaaaaaaaagttttgaaaaattgtttgttagtttttaaaattgtaaaatataaagttattataagatttagaaattttatttttaggtatatattcgagagaattgaaaatatatatttattttagatttagtggtatatgtttataattttagtattttgggaggttaaggtaggaggatattttgaggttaagagtttaagattatagtgagttatgattgtattttagtttgggtagtatagtgagattttgtgatatggtttggttttgtgtttttatttaaattttatgtttagttgttatttttagtgttgggggagggatttgggaggtgagtgaataatggggatagattttttttttgttgtttttaatatagtgagtgattttttacgagatttggttgtttaaaagtgcgtagtatttttcgttttatagttttttttttttgttttcgtgtgaagaaggtgatagttttttttttgttttggtttatgattgtaagttttttgagggtttttagttatgttttcggttaggtttgtagatttatgagttaattaaattttttttttttatgaattatttagtttaaggtagttttttatagtaatgtgagaatagattaatatattttgtttttaaaaataaaaataaaatatataataaaaatatgtatattaatgtttaaagtaatattagtgagttattgttttagttttttattagggttgagggattagggagaaaatggagagtgattgttgatgggtatagagttttttttggaagtgatgaaaatgttttaaaattgattggtgatggttgtatagttatatgaatatattaaaaattatatattttaaagaggtgagtagtataagttaattattttagtaaaattattatattaaaaaaaaatataatggttttgaaaagagttgttagtaataggtgaagaggattattaagggagtttatatttaagtaagttagttaggaaaagtttttaaaataaatatataaataatatttaaattgaaggtcggagagtaagttgaaataagttagagtagtagtagtttttttttttttttttttgagataaattttcgttttgtcgttttggttggagtgtagcggtataatttcggtttattgtaatttttattttttaagtttaagtaattttttgttttagtttttttgagtagttgggattataggtacgtgttattatatttggttaattatttttttgtatttttagtagaggcggggttttattatgttggttaggttggttttgaatttttgatttcgtgatttattcgtttcggttttttaaagttttgggattataggtttgagttattacgttcggtttatataatttttaatttgtattatagttttttagttttataatttttattggttttttttaaatttgttatgtttttgttaataatttaaatttttagttgatattttttatatattttaataataattaatatggttattttagattttgtttttgattattttagagtttttggaggtatttgttttttttgatttttatttatattatttttttattatttttgattacgtgttgggtattgtgtttgaaattttgttgaaataatttgtaataataatattttttttttttagagaggagttttgttttagggtattaggaatttagagttattttaatttaattttagggattgagattttttatttgttagaatttttaaagttgggttttaatttatgttagttttgttttatttttagttttaagagtttatttttagatgttttattttaaattttggggtgttttatatatgatatatttaattgtttttttttttaaatagattttgattttagagtagttttaggtttacgataaaatttagtaggaagtatagtgtttatattatatatgtattttatattattaatgttttatattagaataatataaattattataattgataaatttatgttgatgtattattattatttaaagtttatttttggtgttagatattttatgggttttattttttaattttttttttttttttgagacggagtttcgttttgttgtttaggttggagtgtagtggtataatgtcggtttattgtaatttttgttttttgggtttaagtaatttttttgttttagttttttgagtagttgggattataggtgttttttattatgtttggttaatttttgtatttttagtagagatagggttttattattttggttaggttggtttcgaatttttgggtttaagtgattcgtttgtttcggttttttaaagtgttgggattataggtgtgagtaattatattaggtttttatttat

SEQ ID NO: 197 - DNA, 11523 bp, Artificial Sequence
  chemically treated genomic DNA (Homo sapiens)
attgtttaagacggaaagattttaagattgtgtgattttttttttttttttttttttttttttttttttataggtgtagaataattttttttttttttttcgtggttttttttttttttattttttttttttgttgtttgtaaagttgaatttggggttaggagttttaattgtaattttagattggaattttagatggtgcgtttaggattggaagtaatttttagtttattaattttatgggtttacgtatttgttttggttacggtttggtttttatttttattgtggtattaatgtagaataaattgagatatattttttatataattagttttagaatttaaaaagatttacggtataataatagaggtagtgtcgcggaatttttttattgaggattttcggggagttcggggattatttcgcggtggtattagaatagacgagtaattttagcggttttaggtattgcgaattgggggagagggggaaattttgtatcgtattcggtagtatttaacggtttcgggtttttagatagggttagcgaggagagttaggatagtaagtggggattggttaaaaaaaatcgatttaattttgaaatgattagaagaagttgggagtagttattataaagttttttttttgtttttttttttttttaattgaaggaatgacgttgaaatttttatcgttagcgcggggttgggaattattttaaatatttgttttgtagtttcgagtgggtagatttcgaagagttggagtcggcggggaggggaggaatagttgttgggttgttttgcgcgtggggttcggggcgcgggtttcggggagaggcgttagtcgaaagtttgtttttttttcgcgataggtagtagcgaggtcgagttattttttattacggtttgcgggtttcgcgcgtagtgtggttgttttcgtttttgatcgatcgtagcgttttggggtgtttatttagttgttcgcggtcgttgggtgattttcggagggcggtttaggcgtgcgtattggtttttggggttgcggttgtagtagtttagtttcgcgttttgttagatgtagtggatagcgtcggggtgaaagtaagggttgagaaatttttattgttttgtttttatttagtttcgatttttttatattgtaataattatgtattttcgaggtcgggatgtttgcgttttgttagtgtattaacgttatatggttttttaggggttgttttcgtttttgtattttattagttttgaagaggtagaggggtggtgggtaaaatttttaattggacgttgagagattcgggttttagttcggcgttgttattaatttgttttttgtttttaaatagtagtagtaataaaaattgtaaagttgattgagttaaaggtttatattgtttttttatttaatttttagaataattttatgaggtgggcgttagtattttattatttcgtttgattagtaaggaaattgaggtttagagagattgcggaattcgtttagggttatatagttgttggttatttggtagagttgaggttttattttggggttattaattttttgttttttatcgttgcgttttatagattgtttttttttcggttgtttgggttttagtttttttttttgtaaaacgagaagtttaatttgtagttttttttgttaatcggtggtttagattaggaatttttgttatagatttcggcgttgataggggtaagaaggtgggtgaaagaagggggcgtttagttttttatagtttgtttttttttgggatttcgcgaagggcgggtttcgcgagttaaaggaggtataggagagcgtttatcgttcgcggcgggtgaaggtgttatttgttttcgtgttaggttgtgagttttggtgtttagtttagggcgttaaggttagtgtagttggtatgttttttttggaaaattttaggtttttcgtagagaacgttatttataataaagaagaggatagagaggtatggagcgttttgcgattgtaggagtacgttagttttttagcgttggtttagtgtcgtttgggttttcgggtatgtggattcgttggggtcgtacggagattttttgtcgggtttttggggtttttcgattgcggttttttagtttagtattttttttttggtttcgtaggttgtagggaattttttttatttttttagtcggagaagtttaagtcgggcgagggggtatttcggggttcgtatcggtgtttttttttttttcgtttttataaggattttgagaaaataaatggtagaggagagaggagttttatatttgtttggtttttttttttttttatttatttttatattttttatttcggggtaaaaatttatttttgaaaaatgttggtagagatttacgtgtttttgttttatttgggttttataaatataacgatttatatttaagttagtttttttttagataatttttttttttttcgttaaaagtgttaaggatggtaaaagaagaaataattttaattttttcgtttggaaatgaaagttttcggttttttataaagggtttttcgttttttatagttgagttttagttaagaaaaacgatttttaagtagaaataataggcggggagaaggaagggagatatagggatttggggggtttttagggtaattggtagtgaattttgtttcgagagttttttttttatttaaaaaattaaacgcgcgagtttcgcgaaaggtttagggatagatcgtgtgggagaggattgagtagagagcgtgggggtagtgttttgtagaatttttttttttttaataataattttaaaagtttttgagtggagacgacgtaaagttaagtagtaaaggtggtttgggaggtaagcggagggtttaagtgtcgtatttttatttttagggttttttgcgtttacgggatgcgtatttttaagaagtgcgtttttcgagtaagttttgggttcgtatatatttcgggttcgtagttagaatttaatggcgataacgtttatgtaatgtaagttaaaaattaaagcgtaaaaaattattatgttatttattgaaacgttattttttgttaaattgtaattattttgttttatataagtttggttggaaagtttgtagttttagttcgggttagttaggtataggaggtcggattgtaatcggttgtttttttttcgtcgcgtttggtcgttttacgttgcgtcgtcgttgttgttttttggcgtttttgggattttatacgtatttttgaaatacgtttcgtttcggttttcggtttttttttttgtttaggggttgttttttaatagatattgatttttttagaagatttaaaaattaaattaaaatattttttattcgttttaaatatttgttttggggcgcgggggttgttaaatagagattagacgaagggagttagatttagcgaagtttttcgagtttttaaagattcgaatattaattcgcgttcgtgggtcgatggaggttttttttattttattttttggtttttttaattggttttcgttttttggttaattattgagtaattagaatggtattttcgattagggttataggtagtgttcggcggagtggttttaggagttattcgttttttgtcgggtttcgtatttaaatttttttttttattttttttttttaaattgggcgttaggatgtttcggtcggaatatacgtaggttttgggcgtttgtttaagggttttttttttttttaaattagtcgttgttttttcggtttaatcgtagaagaattagatattttttattggaaagggaaattaagtgttgttgattttaattttaggtaggcggtaatcgtttttcgtttggcgtaaattttattaagtaaataattattagtcgatcgaaatacgttcggtttataattggtgtaattttcggttatttaattgagggacgttcgtttttagtttcgatttttggaatttataaagggttatttttttttttagtgattttaagattatggttatttttttattcgatagttttagaagtaagagttagatttaagggtgtaaagtaagggtatacgtttttttgaagtttgattgagttttttttgcgtttttttgaagttttcgtttttttggagtttatttgtttttttttttaaattatttttttagattaataattttatttttatttttatcgtattcgattttgttcggatttattgtttatttgaacggattttttagtgagacgaggtttttatattggcgaaggttaagaaggggaggtggggggagggttgtgttatatcggttagttgagagcgcgtgttgggttgaagaggagggtgttttcgagagggacgttttttcggattcgtttttattttagttgcgagggcgtttttaaggagtagcgcgcgttgtttggtcgggtttgggttgttgagtgaatggagcggtcgagttttttggttttttttttttttcgcgtcgtcggttttttttatttgagttttgggaagttgagggtagttaggtagttggggtaaggagtttaaggtagcgtttatattcgggggtttttcgtaattcgatcgtttgttcgtttttttatttttcgtttttttttttatttatttatttatttatttatttatttagagtcgggacggtagtttaggcgttcgggtttcgtcgttttttcgtcgcgattttggatttttttttgttgtaggattcggtttttacgtgtgtttcggagtcggcgttttagtatacgtttcgtttcgggtttgggtgtttatagtagttagagtagtagggagttcgggattcgggcggtatttgggttaagttaggcgtcgtcgaggttagcgttgaacgtttttagggtcggaggagtcgcggggcgttcgggtttgagtcgtagtaaatgggtttcgacgtgcgggatttgaacgcgttgttgttcgtcgttttttttttgggtggcggcggcggttgtgttttgtttgtgagcggcgcggcgtagtgggcgtcggtgttggattttgcgttttcgggcgtttcggtttacgggtcgttgggcggtttcgcgtcgttatcggtttcgtcgttattttcgtcgtcgtcgttttatttttttattaaataggagtcgagttggggcggcgcggagtcgtacgaggagtagtgtttgagcgtttttattgtttattttttcggttagtttattggtatagtcggagtttgtcgttacgggtttttcggttttttttcgtttagttaggcgttattcggttaggttaggatgttttttaacgcgttttatttgtttagttgtttcgagagttagttcgttattcgtaattagggtaagtaggtcggggagcgttttttacgcgcggggtagtggcgttagggatttttcgttttaggatattttttttttttattttttttgatcgtagtttttatttagttgttttttaagggtcgtgaggatagcggaagcggcggttggggaggaggtcggagagtgggagtgtacgtaggtattggttttcgatattttttaaagttaggtagagttaggagtttgattgttcgtaagagtcgggagggcgtttggggttttttagagttcgagagatttcgggattgttagtttttacgggagtggaattaggagatcggcgtagtgtttggttttgttttggggagagttttgttaattaaggaaacgttaaattgttattaagcgtagcgttttttagacgtttggattttggattcggagtgggattagcgcgggggtgagcgtttgtgttgtgttgttttcgtagcgttaaaatgtttaggagtatttttagtttttataatacggtgttggtatatatttaggtgtatattaagtatcgtagagaattagaatgagtatatgtatttttagtaattaaatggttttttggaatagcgtcgtgttcgtggatagttttcgcgtatggtaatatagaagtggatttttattgggtttcgtttaggcggcggttacgtaggttttggggatggaagagaatttgatttattcgagtttaagttatgcgggattaggttttatcgtaggtagtggaaggaggtacgagttttggttttttttttagcgtatttggggcgtttttttattttgtaaacgcggggtttagttgggatagtatttttttaagatttggggttagaataaggatagggttattcgttgtgtttagttaggatataaggagggaattcggtatacgataagtattaggttggttttttatttcgcgtcgatgttcgtttatttttttttcgtttgggcggcgcggattcgaatttgcggagtttttgtagtttgttttttttatttatttttagtggatttttacgttattgagaatttaagttagttcggtttgattcggtaatttagtaaacgttttattaatataatggcggatgttttttttggagtaaaattattcgagggtttagggatcgggatgtttttggaatgcgtgggaagtagagtgtattttttgtaggaggtattttcgtttaaggttcgggagaagggttttgtttttgttgttcgtttttattcgcgttttttaaacgcgcgtttttaggtcgtttttattttagtttaattaggagtattcggttttcgcgaagttttggagaaatcgaaatcgttttttttttcgggagaatttgggattattgttttgtggaggaatcgtaagtagatttaagggttgtttttattttatgtttttagttagtgaaattagtgttttgtatttaaggggcgttgggataatttattggtcgttgaggtttgtgttttttgattagatcgcgttatttttgtttagtaggttggtgttatttttggggagtttttaggttttagtgttttcgtttataagaggatagttgagatgggtaatttggagattgggttcggtttgaagttatattttatagatgtagaagcgttatttattatttttttggggttttaaatatggaattcggtaatttatttaaatatttgtgattgagaaataatgaattcgagagtattgtttgtatgtgtgttatttggaggcggttgagaaattatcgaatttatgtttttggggtataaaatattattacgttattatttttttagtatttttaggggatttttgaaatttgggttttgtcgtttcgtttgggttttttgtttagttttttttagggtaggtttggtgtttgggattttattatatgtcgtggggggtgggattgtgggttttgtagttagtaggtattatatttttggaaaatatttggatttttttgtaatatataggcgtggttgttatggagaaaaagttaaaaggggattaggattagtaggtgaatgtattttttttttttattttggagaaaaagtttaatggagagagggttttagatttaagttatatagtttggaagtattatttttaggtttaagttttgttttgtagtgaaaatagatgggtttattttatttagtttttgaggtttattgggtagtttggatgtgagaagcgtttcggttgttattttggagtgggtaagggtggttttcgagattttgggtttattttttggatttttagggtttttgttgtttttttaggaatgtagggtttggtttaagatttgggttgtgagaggtaagggtattaatttttaaaaatgtggaaatggttattagagcgttaaggttaaattttaggggagaggaattaaggtcgtttttggatttttagggtagtttagttatggtgtataggtaggggtaattgttggtatttatttataatcgtttaaaattttataagtatgtttatattttaaatttttaaatattatattttgtattttaattttgtaaatattaatttagtaaatattaatcgtttatttggttaggtattgggttttgaatattaattaagataatggtttcgagaatttttgtaagaagtttattagttaattttggagaggttttttgttttggatgaggaaatttaggttttatgagattaggtggtagaggtgggatttgaatttagattatgttagggtgtttttattttttttttagggattttggttttatcgttgagatggattttttttggtttgcgggaggggtattaaatttttagtttatgtgtgggggttgacgggtttgtgagggtagatgtggggtgaggatttgagtagttttagattagatgtaaggtttaaggaggaggggaaaaaagtttgtttgggtcggacgcggtggttcgaggcggttggattatttgaggttaggagtttgagattagtttggttaatacggtgaaattttgtttttattgaaaatataaaaaaaaaaattggtcgggtttggtgacgggcgtttataattttagttattcgggaggttgaggtataagaatcgtttgaattcgggaggttgaggttgaagtgagttgagatcgcgttattgtattgtagtttgggcgatagagcgaaatttcgtttcggaaaaaaaaaaaaaaaaaagaggttgtttgttagtttattgatttcgtagtttcgtaggttcgtagaattttaaggtatgattaggtttgggattattaggttattttagggttaggtgcggaggtttgcgacgttcgagggttaaaggttttttttttcggttatataggagagggtattttgttgggggataggttttttttaattatagtgtagttgtagttatcgtttttagttttttgagtatttttttggttgagtttgttgtttattttattttttagtttttacggttcggttaggttaggcggttttcggtttttttgtagtcgtcggcgggggaggagggtatagagcgcgtttcgttttttagcgtacggttaaggttgcgtttttttttcgggtcgggattaatcgtgggaaaggcgttattttggttattcgattttttttttttaaggtttgtataaggagtttttgaatacgttgttttttttagtcggtagttttattttttttggtttttgttttcgtatttttcgcgttaggttaagcgttgggtttagggatagcgcgttttaattaaattcgtgttcgataagtttttaattaaaagagattttttttcgtttcgtaggcgtttttattattgtttttttcggggggatttgaaggagagggtttgaggtcggtttttgttcgtcgaggtttgcgtgttcggtttgggaggaggtttaggagggttcgcgggttacgggtatttttgggttcgagttttggggtgcggacggacgtttcgagagtgggtgtcgcgattcgggatttacggttttcgtcgggtacggatagttgcggagtagggttttgaggattgtgtagtgttttgggtttttgtttatttttgggtttaggaatggagaagggttcgtttagagaaaattttttcgtagtttttatttcgtttttttttttttttttttttttttttttttttttttttttttttttttttttttttttgtgtttgtttttttttttttttttttttttttagtgtttttttagaaattcggtttttatttcgggtaatagtgggtgttttgagttaaatttcgtttgtaagtttatttataggttttaaagaaggttaggttttaggttttaaaaggaagtttgtggaagtttaaacgtgttcgtttatgtaggagagttaacggggtcgggggttatttttgtttatttagtaggagagaaatggaggttttcgaggttatatgataaaagttagtggttttttaaatttttagtgtgtggtgttgagtagtgtgtgagatttaagtttggatttgtattattcgggagttaggatttgtttttttttttttttttttgtattttgttatattattttttaggtttatgtttttgttgttttagagaagttttttttttttttttttttttttttttttttttgggcggggggtggtggtgtgtgtgtatgagcgttcgtgtgtgtttcgaaaatggaggtaacgatgttttgggttttgtttatcggttgagttttgtttaagtttttggaggtattttggttaaatagtgtaagagtgggagaatgggtgttgtttgatttaatttatttttgagaattttgtgaagtttggagatttagggtagttttgggttaggaggatttgaggttgttggggtggttttgttaggattttataggagtagttttttttagttattgtgtttggattttaggttatagatttcggaatttgtagaggaatgagattttatttttgggtttcggggttaatgacgtatttttagtcgaaggatttttttttttagaggtagtaatagttttttagaagtttgtggggtataagtttaaagtaatttaataataaaaattataaaagattatgttttttaattgaggttttacgtttttttttttattttgggggggggggggaatgttaggatttttttagggggaaattgaggtaaaggatcgaagtattattatggagggaaagggagatatagtgttaggtatattttaaaggaaattggttgtttagtttggggagtgaggaagttggtttttatagtagtggttagggtcggatttttgggcgtaaggtgggttttataggggggaggaggaggagagcgtagggtcgttatttgaaggtttaattggaaggggtttttgtttttttttttattagtttttttttgggtgttatggtgttaggtcgggtagttttagatagataatattattcggtaattattttttttatttttaagattaggttatttaattggtttcgagtaattaatgaaagttggtgcgcgggtttttgatttatagttcggagttaacgcggggttagtttagtagatttatttcgtttgttcgcgttgtttttgcggaagagttgtagtttatttttggggggtgaataattttttttgtcgattaggtaacgagttttatatttaatttgttaggggttcgttgtagaagcggtagagatcgtagaagattgcggtataaataaattgggaaaaagcgaggtgggggttttagttagaaaaggatggagaagtttgttttaaggttatatttagggatttgggtcgtttttttgtcgaaagttttggaggtttgtggggttggattttttttcgttgggggttcgaatgcggggtttagcgtatatttttttcgttcgtggttggtttagatttattgtttcgttttgcgagagtatcgttgatattgtgttttttttcgtcgttttcgtagg

SEQ ID NO: 198 - DNA, 11523 bp, Artificial Sequence
  chemically treated genomic DNA (Homo sapiens)
tttgcgggagcggcggagagaagtatagtgttagcggtgttttcgtaagacggggtagtgggtttgaattagttacgggcggggggggtgtgcgttgaatttcgtattcggatttttagcggaggagaatttagttttataagtttttaggattttcggtaggaagacggtttaagtttttggatgtgattttgggataggtttttttatttttttttgattaaaatttttatttcgtttttttttaatttatttatgtcgtagttttttacggtttttgtcgtttttgtagcgaatttttggtaaattaagtataaaattcgttgtttgatcgatagagaaggttgtttattttttaaaaataaattgtagttttttcgtaggagtagcgcgggtaagcgaaatgaatttgttgggttaatttcgcgttgatttcgagttgtaaattaggggttcgcgtattaatttttattaattattcggagttagttaaatggtttggttttaaaaatgggaagagtaattatcgagtaatgttatttgtttggggttattcgatttgatattatgatatttaagggaaagttggtgagggggaaaataagggttttttttagttgggtttttagatggcgattttgcgttttttttttttttttttttatgggatttattttgcgtttaggggttcgattttgattattgttgtaggagttaatttttttattttttaggttggataattaattttttttagagtgtgtttgatattgtatttttttttttttttatggtagtgtttcggttttttgttttagtttttttttagggaaattttagtatttttttttttttttaaagtgagaaaaagagcgtggagttttagttggaaaatatagttttttataatttttgttattaaattgttttaaatttatattttataagtttttggaaagttgttgttgtttttggggaaaaggatttttcggttaaagatacgttattggtttcggaatttaaggatggggttttatttttttataagtttcggagtttgtggtttgaagtttagatataatggttaaggagagttgtttttatgggattttggtagggttattttagtagttttagatttttttggtttaggattgttttgggtttttaaattttataaaatttttaggagtaaattgggttaaatagtatttatttttttatttttgtattatttgattaaagtgtttttaaagatttaagtaggatttagtcgatgagtaggatttagggtatcgttatttttattttcgaaatatatacggacgtttatgtatatatattattatttttcgtttagaaaaaaaaaaaaagaaaaagaaaaaaaaaaagtttttttggggtaatagaggtatgagtttggagggtggtgtggtagagtgtaagggagggaaggagggggtaaattttaattttcggatagtataggtttaggtttaagttttatatattgtttagtattatatattggggatttgagaagttattagtttttattatatgatttcgagggtttttattttttttttgttaagtgggtaaagataattttcggtttcgttagtttttttgtatgggcgagtacgtttgggtttttatagatttttttttgaaatttgaggtttggttttttttgaggtttatagatgagtttataaacgaaatttggtttagggtatttattattgttcggagtgaaggtcgaatttttgaaaggatattaaaaagagagagagagaaagagagatagatatagagagagagagagagagggagggagagagagagagagagagagagagagagagagagacgaaatagaagttacgaagaagttttttttagacgaatttttttttatttttgagtttaggagtaggtagggatttagggtattgtataatttttagagttttgtttcgtaattgttcgtgttcggcgagggtcgtgggtttcgagtcgcggtatttattttcgagacgttcgttcgtattttagaattcgggtttaaggatgttcgtggttcgcgagtttttttaggtttttttttagatcggatacgtagatttcggcgggtaaagatcggttttaaatttttttttttaggttttttcgggaggggtagtggtgaaagcgtttgcggagcggagggaggttttttttaattagaagtttatcggatacgggtttgattagagcgcgttgtttttgggtttagcgtttggtttggcgcggagagtgcgggggtaggggttaggggaggtaaagttgtcggttggaaggagtagcgtgtttaaaggttttttgtataggttttggagggagagaatcgagtggttaaggtagcgttttttttacggttagtttcggttcgggaggggagcgtaattttgatcgtgcgttaagaggcgagacgcgttttgtgtttttttttttcgtcggcggttgtagagaagtcgggaatcgtttggtttggtcgggtcgtgagagttgaggggtgaaatggatagtaggtttagttaggaaggtgtttagaaggttgaaaacgatgattgtagttgtattgtgattggggaaaatttgttttttaataaaatatttttttttgtgtgatcggaagagggagtttttggttttcgggcgtcgtaggttttcgtatttgattttagggtggtttgatgattttaggtttaattatgttttagggttttgcgagtttgcggggttgcgggattagtggattagtaggtaatttttttttttttttttttttttcgagacggagtttcgttttgtcgtttaggttgtagtgtagtggcgcgattttagtttattttaattttagtttttcgggtttaaacgatttttgtgttttagtttttcgagtagttgggattataggcgttcgttattaagttcggttaatttttttttttgtatttttagtagagatagggttttatcgtgttggttaggttggttttaaatttttgattttaggtgatttaatcgtttcgagttatcgcgttcggtttaagtaagtttttttttttttttttttaagttttgtatttagtttggggttatttaagtttttattttatatttgtttttataaattcgttaatttttatatatggattaagagtttggtgtttttttcgtaggttagaagaaatttattttaacggtggggttaagatttttggaaaaggagtagaaatattttagtatggtttgggtttaaattttatttttgttatttaattttatagaatttggatttttttatttaaaataaggggtttttttaggattagttggtgagttttttgtaaaggttttcgaggttattgttttaattaatatttagaatttagtgtttgattaagtaggcgattgatgtttgttaaattaatgtttataagattaggatgtaagatataatatttaagaatttaaaatatgaatatgtttgtgaagttttgggcggttgtgagtgggtattaataattgtttttgtttgtgtattatggttagattgttttagggatttagagacggttttgattttttttttttggggtttggttttggcgttttgatggttatttttatatttttgagagttgatgtttttgttttttatagtttaagttttgggttaggttttgtatttttggggaagtagtaggaattttggaaatttaaagaataaatttagaatttcgagggttatttttgtttattttaggatagtagtcggagcgttttttatatttaagttgtttaatgagttttaagggttgggtaagatggatttatttgtttttattgtaagataaaatttaaatttggagatggtgtttttaggttatatgatttgaatttagggttttttttttattgggttttttttttagggtggagaagaaggatatatttatttattagttttggtttttttttaattttttttttatggtagttacgtttgtatattatagaagaatttagatattttttagaagtgtaatgtttgttggttgtaaaatttatagttttattttttacgatatgtgataagattttaggtattagatttgttttgaaaagggttggataagggatttaaacgaagcgatagaatttaggttttaaaaattttttagaagtattaaaaagataatggcgtagtagtattttgtgttttaggggtatggattcgatggttttttaatcgtttttaaatagtatatatgtagatagtgttttcggatttattgttttttagttatagatgtttagatgggttgtcgagttttatatttaaagttttaagagggtggtgggtagcgtttttgtatttatggagtataattttaagtcggatttaatttttaggttgtttattttagttgtttttttatagacggggatattgagatttagaaattttttaaaagtaatattagtttgttaaataaaggtggcgcgatttgattaaagaatataagttttagcgattagtaagttgttttaacgttttttgagtataaaatattaattttattaattaaaagtatagagtggaggtaatttttgggtttgtttgcggtttttttataggatagtgattttagattttttcgaagaaaagggcggtttcgatttttttaaggtttcgcgggggtcgggtgtttttggttaggttaaggtaggagcggtttgaagacgcgcgtttagaaggcgcgggtgaaggcgggtaataagggtagagtttttttttcgagttttgggcgaaggtattttttgtaaaagatatattttgttttttacgtattttaaaaatatttcggtttttaggttttcgagtaattttgttttaggaaaagtattcgttattgtattagtaaagcgtttattaaattatcgaattaaatcgaattggtttaggtttttaatagcgtggaaatttattgaaaataaatgaagagggtaaattataggggtttcgtaggttcgggttcgcgtcgtttaggcgaaagagaggtgggcgggtatcggcgcgggatgagaaattaatttgatatttatcgtgtgtcgagttttttttttgtattttgattaagtatagcgaataattttgtttttgttttaattttaggttttgaagaaatattgttttagttgagtttcgcgtttataagatgaagaggcgttttagatgcgttgaaagaaaggttaaagttcgtgtttttttttattgtttgcggtagaatttggtttcgtatagtttggattcggataagttaagtttttttttatttttagaatttgcgtggtcgtcgtttgagcgaagtttagtgaagatttatttttgtattattatacgcgggagttatttacggatacgacgttgttttagaaagttatttagttattggaggtgtatgtgtttattttagttttttacgatatttaatgtgtatttaagtgtgtgttaatatcgtattataagggttggaggtgtttttggatattttagcgttgcggaggtagtatagtataggcgtttattttcgcgttggttttatttcgaatttagagtttagacgtttgaaaagcgttacgtttggtgataatttggcgtttttttaattaataaaattttttttaaggtagagttagatattgcgtcggttttttggttttattttcgtggggattagtagtttcggaatttttcggattttaaggggttttagacgttttttcggtttttgcgaatagttaggtttttagttttgtttggttttggaggatgtcgggggttagtgtttgcgtgtatttttatttttcggttttttttttagtcgtcgttttcgttatttttacggtttttgggaagtagttgggtaagagttgcggttaaaaggggtaggagaggggggtgttttagagcggagagtttttggcgttattgtttcgcgcgtagggggcgtttttcggtttatttattttgattgcgaatagcgggttggttttcgaggtagttgggtaggtagggcgcgttaggaaatattttggtttggtcggatgacgtttggttgggcggaggaggatcgaagggttcgtagcgataggtttcggttgtgttagtgaattggtcggaaaagtggatagtgaaggcgtttaggtattgtttttcgtgcggtttcgcgtcgttttagttcggtttttgtttgatgaaggagtgaggcggcggcggcgggggtggcggcggagtcggtggcggcgcggggtcgtttaacgattcgtaagtcgaagcgttcgggggcgtaaagtttagtatcggcgtttattgcgtcgcgtcgtttataggtagggtatagtcgtcgtcgttatttagggaggggacggcgggtagtagcgcgtttaggtttcgtacgtcggagtttatttgttgcggtttagattcggacgtttcgcggttttttcggttttggagacgtttagcgttggtttcggcggcgtttaatttggtttagatgtcgttcgggtttcggattttttgttgttttggttgttgtaggtatttaggttcggagcggagcgtgtgttgagacgtcggtttcgggatatacgtggaagtcgggttttgtagtaagaggaagtttaggatcgcggcgaggagacggcggggttcgggcgtttgggttgtcgtttcggttttgggtgggtgggtgggtgaatgagtaggtgggagggagggcgggaagtgggggagcggataggcggtcgggttgcggagagttttcgggtgtgggcgttgttttgaattttttattttagttgtttggttgtttttagttttttaaagtttaaataagaggggtcggcggcgcggggaagaggaggagttaggaggttcggtcgttttatttatttagtagtttaagttcggttaggtagcgcgcgttgttttttgggggcgttttcgtagttggggtgagggcgggttcgagggagcgtttttttcggagatatttttttttttaatttaatacgcgtttttagttggtcggtgtggtataattttttttttattttttttttttggttttcgttagtgtgggagtttcgttttattggagagttcgtttaggtaagtagtgagttcgggtagggtcgaatgcggtgggagtagagatggggttgttaatttaaaagagtggtttggagggaggggtaggtaggttttaagagggcgggaattttaggaaagcgtagaaagaatttagttaagttttaaagaagcgtatatttttgttttgtatttttgagtttggtttttgtttttagaattgtcgggtaggggagtggttatgattttggggttattggggaaagaggtggttttttgtgggttttagaggtcgggattgaaagcgaacgttttttagttgggtggtcgggagttgtattagttataagtcgggcgtatttcgatcggttagtagttgtttatttggtgaggtttgcgttaggcggaaggcggttgtcgtttatttaaaattggagttagtagtatttagtttttttttttagtgaggaatatttaatttttttacggttaagtcgggaaaatagcggttagtttaggagggaagaaaatttttgggtaaacgtttaaagtttgcgtatatttcggtcggagtattttggcgtttagtttggggaggaggggtgaaggggagggtttggatacgaagttcggtagggagcgggtaatttttggagttatttcgtcgagtattgtttgtggttttggtcgaggatattattttggttgtttagtgattgattaggaggcggaagttagttaaggggattaaggagtggagtagggagaatttttatcggtttacgggcgcgagttagtgttcgaatttttgggagttcgaagagtttcgttaaatttgatttttttcgtttagtttttgtttggtagttttcgcgttttagagtaggtgtttggggcgggtagggggtgttttggtttggtttttggattttttaaaggagttagtatttattgggaaataatttttaggtaaggagaagaatcgggggtcggagcggagcgtgttttagaggtgcgtataaaattttaggggcgttaggaggtagtagcgacggcgtagcgtgggacggttaggcgcgacgggagggaagtaatcggttgtagttcggttttttgtatttggttggttcgggttggggttgtaagttttttagttaaatttatgtgaagtaaagtagttgtagtttgataaagaatggcgttttaataaatgatatagtaattttttacgttttggtttttagtttgtattgtataaacgttgtcgttattaaattttggttgcggattcgaagtgtgtgcgggtttaggatttattcgaagggcgtattttttgggaatgcgtatttcgtaggcgtaggagattttgagggtaaagatgcggtatttgagtttttcgtttgttttttaggttatttttgttgtttgattttgcgtcgtttttatttagaagtttttaaaattattattaagaaaagaaagattttataagatattgtttttacgttttttgtttagtttttttttatacgatttatttttaaatttttcgcggggttcgcgcgtttggttttttgagtggagaaaggattttcgagataaaatttattgttagttgttttaagaattttttagatttttgtatttttttttttttttttcgtttattatttttatttggaagtcgttttttttaattaggatttaattgtgaggggcgaggagttttttatgaaaagtcggggatttttatttttaaacgaaaagattgagattgtttttttttttattatttttggtatttttagcggggggagaggaggttatttgaagggaggttggtttgaatgtgagtcgttgtgtttgtgaaatttaggtaaggtaaagatacgtaaatttttgttaatattttttaaaaataagtttttgtttcggggtgagggatgtaggggtggataggaggaaaggagagttaagtaaatgtagaattttttttttttttgttatttatttttttagaatttttgtgggggcggggaggggaagagtatcggtgcgaatttcggggtgttttttcgttcgatttggattttttcgattaaagaggtgggaggagttttttgtagtttgcggggttaagaagaaagtgttaagttgaggagtcgtagtcggaggattttagggattcgataggaagttttcgtacgattttaacggatttatatgttcggaagtttaggcgatattaagttagcgttggggaattgacgtatttttgtagtcgtagggcgttttatgtttttttgtttttttttttgttgtgggtaacgttttttgcgggagatttgaggttttttaagggggatatgttagttatattggttttggcgttttgagttaagtattaggatttatagtttagtacgaaggtaggtagtatttttattcgtcgcggacgataggcgtttttttgtattttttttagttcgcgaggttcgtttttcgcgaggttttagagaaaagtaggttgtggaaaattgggcgttttttttttttatttatttttttatttttgttagcgtcgagatttgtagtagaggtttttggtttgaattatcgattggtaaagaaagttgtagattaaatttttcgttttatagagaaggaaattgaggtttagatagtcgaaggagaggtagtttatggagcgtagcggtaaagagtaaggggttggtggttttagaatggaattttagttttgttaggtaattaatagttgtgtgattttagacgagtttcgtagtttttttgagttttagtttttttattggttaaacgggataatgggatattagcgtttattttatagagttgttttgaggattagataggagagtagtgtgggtttttgatttaattaattttatagtttttgttattattattgtttaaggataggaaataagttagtggtaacgtcgagttgaaattcgggttttttaacgtttagttggaggttttatttattatttttttatttttttagagttaatgggatgtagaggcgaggatagtttttggaaaattatgtggcgttgatatattggtaaagcgtaggtatttcggtttcgaaggtgtataattattgtaatatgaaaaaatcgaggttgggtaggagtagggtagtgaggattttttaatttttatttttatttcggcgttgtttattgtatttgatagagcgcggagttgggttgttatagtcgtaattttagggattagtgcgtacgtttgggtcgtttttcgggagttatttagcggtcgcggataattgaataaatattttaaagcgttgcggtcggttaagggcggggatagttatattgcgcgcggggttcgtaggtcgtaataaagagtggttcgatttcgttgttgtttgtcgcgggagaggaataagttttcgattagcgttttttttcggggttcgcgtttcgagttttacgcgtaagatagtttaatagttgtttttttttttttcgtcgattttaatttttcggaatttgtttattcggggttgtagggtaagtgtttaggatggtttttagtttcgcgttggcggtgaaaattttaacgttatttttttaattaaaaaaaggggggggtaagggaggggttttgtgataattatttttagttttttttgattattttaaaattaagtcgattttttttaattagtttttatttattgttttaatttttttcgttgattttatttgggagttcggaatcgttaggtattgtcgaatgcggtgtaaaattttttttttttttttagttcgtagtgtttggagtcgttggggttattcgtttgttttgatgttatcgcgagatggttttcgagtttttcgagagtttttagtgaaaggatttcgcggtattgtttttattattatatcgtaaatttttttaaattttggaattaattatatagaggatatgttttaatttgttttgtattaatgttatagtggggatggaggttaggtcgtggttagagtagatacgtaggtttatgaaattgatgaattgagagttgtttttagttttgagcgtattatttggaattttagtttgaggttataattagaatttttgattttagatttaattttgtaaataataggggaaaaaaatggggaaaagaaaaattacgagagagggaaaaaaaattattttgtatttgtaaaaaaaaaaaaaaaaaaaaaaaaaaaaaaaaagttatataattttaaaattttttcgttttagataat

SEQ ID NO: 199 - DNA, 8588 bp, Artificial Sequence
  chemically treated genomic DNA (Homo sapiens)
  unsure (4416, 4418, 4430, 4434..4435, 5243, 5245, 5612)
atttttatttatttatttattttgagatggagttttattttgttattaggttggagtgtagtggtatgatttcggtttattgtattttttgattttttggtttaagcgatttttttgttttagcgtttcgagtagttgggattataggtatgtattattacgtttagttaatttttgtatttttagtagagatggggttttattatgttggtttagatggtttcgattttttgattttgtgatttatttgttttgattttttaaaggttgggattataggtattagttattattatgtttggtttataatgagatgtttttgtgtaagaaagaaatggtatatttttttaatttatagatattaattttagtttttttattttattttgttttttatatattgtaacggatagaatatttgtgttttttgaaaattagtatgttgaaattttaaattttaatgtgatggtatgaggagataaggtttttgggagttagtagataacgagggtagggtttttatgaatgaaattagcgtttttataaaagatattttagaaagttttttagttttttttttttttttataagagagtataggaagaagttatcggtttgtaattcgaagagggtttttgttagaatttaaattatgttgacgttttggttttagatttttagtttttagtattgtgagaaataaatgttgtttaagttatttagattatggtattttgttatagtagtttaaattgattgttatagtagatttataattttattttattatttttatttttggtttagaagtattttaattaaaatagttatagttttttttgttttgtttgagaatggtttaagttaagtgatatattttttttatttttttatgagtaagagatttttgggatttattgtttaatgttattttatagaagaattgtatagattttttagattattaaattgtaatttttagatttagtagttttgttatttatttttttattatgtttttaaaaggtagtaatttatttgtaggtaattgttgattttgtttttgattgatttgaggttttatagattttacgtagattatttattggggttttaatattatagatagaatatttataattttttataaatattttttatattaaattgagtttgatggaaataggggtgtaatttatattttatttttttaggttaatttttttttgaaatgagtattttgattgggtaaggtggtttaggtttataattttagtattttgggaggttgaggtaggaggattattcgtttataggagtttgagattagtttgggtaatatggtaaaatttttttttataaaaaaaaaaaaaaaatatatatatatatatatatatatatatatatatatatatttatatttatatgtatatatttatatatatatgtattatatatatgtatatatttataatgtataatatatattatatatatatatatttatttataaaaaattagttaggtatggtggtatgtatttatagttttagttgtttagatggttgagttagggaggatttttttagtttgggagagatatagtgagatattttttttaaaaaaaaaaaaaaaaaaagatttttttttttttattttgttttagtattatatataattatatttttgttagagttagattggtaattttttttgagatagtgttttattttgttatttaggttggagtgtatagtttgtatgatggtattattatagtttatgtagttttaattttttaggtttaagtgatttttttattttagtttttcgagtagttgggattataggcgtatgttattatgtttagttaattattgtatttttggtagagattaggttttgttatgttgtttaggttggttttgaatttttgggtttaagtgatttttttatttttgttttttaaaatgttgggattataggtttatggtaaaattgattttgttatatgtttttgtaggttttttttattgttgtttgtttgttttgagaacgagtttcgttttgttgtttaggttggattgtagtagcgtgattttcgtttattgtagtttttgtttttcgggttttagttatttttttcgtttagtttttcgagtagttgggattataagtgtttattattacgttaggttaatttttgtatttttagtagagaggggttttattatgtggttaggttggtttcgaatttttgattttaagtgatttgtttgtttcggttttttaaagtgttgggattaaaggtatgaattattatgtttggtttatttttgtgtttaaagtcgtagtttttaagattttttttatgattatgttaagtgaggatttattgtatttgtatatattgtatttgtaaatttttcgttatttttatttttagattgtttataatattttatacgatgtaaattttaaattatttttatattgtttataatgttttatataatgtaaatgttatgtaaatatattgtattgcgttttattttgtattatttttattgttgttgttgttttttaatgttttttatttagggttggttgaaattgaggatggggaatttaggatatagagggtttattgtatattatatattatatatagtatattatatatgtattatatatgtatataaaatggtttgatattatttatttatgtaatgaataaaaatttaggtttgaaaattatttaaaataattttggtatatttaaatattgagttgttgcgtttttttttattggagggggagttagaataagtggtgttttgaggttagttatagtttatcgtggatgaatatttgttaaagaaaattgttattaatttaataaattatttatttattttttggtggtataaagggtttagtaaattttggtgggttatttgtttttaagtaaagaataatttgtaaagttgatttggaggacgtttgggaataaacgagaggtaattacgtgaaaggtaacgtgtatgtgatttttatagaaaatattatttgatgatgatttagtacgtgaagtgtagttagggtaaaaggaaaatttgagtgttgtagattaagggtattaggtgggacgtagttggtatgtaagtttagttagttaaaatatgcgttgttaaattaattatttgggattataatgttttggtttttaggaaaggttgtttgttgaagtagttaaattttagtttggagagatagagttgaaattttaaggagatttttttaagaagtatttcgatatttttttcgatattttgagaagattacgaggcgttaagaatgtacgttttgcgttttattttaattttttttttagttatttggttttaaaattaggtttttaaaatggattagagaggtttggggtttaaaattggtttcggaagcgtttttttttttttttttttttattttttttagagtttaaaattgggtgtgttttttttttttcgaacgtagtttttattcgaagggcggattttgattttcgcgggtttaggttttcgtaggttggcgggagtcggtgggggcgggtcggtcgagttcgggggaagtaaagagaacgttgtcgcgcgtttcgattaaattcgcgtcgttattagtttacggacggcgttttattttttttttatcgaagagtttttgttatcgaagaggtttagttaatgagcgggcgagaaggtcgggtttgcgaattaggtatcgggagggagagggtcgtagggggaagggaagtcgagagttcgagggcgggttgtttttgattgatagttcgttcgaacgaattttttacgcggttttttttcgtttttttttttatttatttttgtttttcgttttattttttttttttttatttttttttttttgtttttcgattttttttatttttttttttttattttgcgggtaaatcgttgttgaaaagaggtaggggtcgaagcggcgggttcgtgtggagtcgtgaggcgggattgattggcgttcgggttaatgagagataggtttatggcgcggttgtagttggaattgattaataggagggcgggttgggggcggaggtttaggttttaaacgtttcgcggcgttatgggttgaaaatttaatcgagatggaattttttagtttgaatcggttttaatcggtttcgagtttgaggtattaggaggagggggagaagcggttgtagcggtcgcggtaggagtagcgggagttatagtattagtaagagtaatagtagttatagtttcggcgcggtgtttgttttagtttttgttgttgtagttcgtgtaattatttagagggggagggggtaattattagtcgttgaggaataananaagaggcgatantttnnncgagtttaagggggggggggattagttcggagtcgcgtgagagagggagtcgtgttttggtaggggggaatcggattgtaattggtagtagagcgttttttcggtcgtgtggattttatattttttatttttgtcgtttttgttgtttttgtggttggagggttttggggttgaatttttgggatttgatttcgttttttttttttttttttattttttagtcgggcgggagtatttattttttagattaattttttttttgggggggggcgggtgtgtgtgtgtgtgtgtgtgtgtgtgtgtgttgggggaagcgtttttgaaatagtaaatattattgagttttttttgttttttttttgttcgtttttttaatttttttttttgaggtgggaaaattgaaatttattttgattcgtttttttttttttttttttattttttttcgttttaattttttaacgaggaaggaaggagtagttggtttaatttttgggtaagtcgattgtgttttcggggtcgagggtcgggcggcggcgcggcgggtcgggcgggaggaggtcggcgtgggagcgcgcggcggcggtcgcgggaagcgagttcgggaggcggcgggcgggtcgggggcgcggcgggtttatagcggagtttgcgattgaatggagtcgtttttgtcgttgggggatggaggcggggaggcggtttcgggaggggagcgtttgttgggttattcgcgtgtgcgggtggcggtggaggaaggcgaggagtgtgatagtgaagcgggtttcgcgcggggtgggaggggtntntttttttggggttggggagaagttggggtgattttaggaatatttttgtaaattattaggagtggaagtttttagaaatatttagtgtagtagtattgaaacgttcgtttgtattacgtggttttttcggtggagagtttgggatgggggagggaggggttgtcgattttttgtttttttagtaaggaaattcgaaagtttttcggttttgtagagtggtatgtgaagtaggaaagattagttttttaggggtttgtatatgggatttcgttttgtagtttttttttaggggtttgaatgtgataagttggttaaattatttattgtggttttgtatagtgacggatgttttgatttttttttattntcgatgtttgtgagtttgggttgggtgggaggaagtggtgtagtagaggaagtatttagtattggtttagtcgcggattttttttgattacgtcgaggttatgttgtatagagaaaggggcggtgaatttaaggcgtttggtttaaatgtttttttcgagtaagggcggggtgagtgcgtgtttttgtgtgttatagttagaagggttgtaaatcggttcgggtgggaagcgaggggagggcgggttttaatgaggtgtgttttttttgaatgaagcgggcgattgtttatataatttaaggagtagtttttcgttttgtagcgatttgttttttatttagtgtgaagttattaagtaacggttatgattttttgggttttgtttaggaattggtattgggtgttatttgtagagttatattatttattaagttggataatttttagtgtatgttatttagtgagtggattttaggattgaagagtttaatgggaatgagcgttcgtggttatatttttcgtattatggtttgtttgttgtttgattgtatattttaagtgtgggatattgttgttagtggaaagaatgttttggaagcggtttgatttgggggattaaatgtgtttggtattgattataaagtcgttatttttgtattatgtatagtttaggaataggtaggtgatttcgaagatagtcgttagttttaaggatggtaaattattgtatttaaatttttttattttaaatttcgttttttatattagtttagttcggagaattttataagaatagtgtatttgaaaatgaaatttgtaagagttatttttttaatttttttttgttttagtatttaattatggtagtaaataggtgaaaagtttgtttaatatttaatcgaaatatttgaaaatttttgatatatggattttggtgttttgtggatattgtttttaagttttaaataattaagattgttttgattttttaaattttatggtatttgaaggtggaggagagtttatatatttatttgtggaatatatatttttttttagtatttagattttaaggtttttttgtggtgtgtaataagtattttgttgtttaaaaacgtttgtttaatgtttattacgaaacgttttgaagttttattagttttgttaataatggattaatttttgaatttttaattttttgagttttatattatttttatattatattaattataggtgatttattttttggagttttaatttgttgtaatagacgttatatttaaataagataattgtattaaaatagaatttgttgttattattgttatggatatttttaagttgttataaaatagttaggaattaatgatttttttttcgttttgttaagttagtttgtttaaatataatgtaaagaaattagttatttattttttggtttacgaaagtttttaaaatgggaagaagtggagatttgattttgttagttttaaatatattaaattgggagtgttatggatggtttttaggatgttttgaattttttataattgtatataaaatcgtgagtttttaaaaattgggttagagttattggttttttagagttttaggtattttagatttttaaaaaggttaaggattattgatttaattaattaggtttgagtggtattggttttgaagaaaagtagaggaaagatatattttataattttgggtaataaaaaagtggatgtgtgttagtattttagagtagaatttttttaaaaggatagtattgtatatgaattagtaggttttaattagtgtatatttaggcgaagtagtttatttttttgttagaatttttttttatttgggaatgggtaagtttttatagtttttattttgttaatgaatatttggaatttaaaaaattttgttaggtatattgtttataaagtttttttttttagattatatatttagtaaatatgtttgtagttttattttaattttttaatttattgagggttgaaataatttgaatggtttgagtgtagaagttaagttatttttgtagaggttaagcgtatatatattaagatatgttagatttgtggttttgttaattattgttgtagataataggaattattgtatatttatattttaatttttaatattattttgtttttgtttgtttgtttttgagatggagttttatttttttgtttaggttagagtgtggtggtgtatttcggtttattgtaaatttcgttttttgggtttaagtagtttttttgttttagttttttaagtagttgggattataggtgttcgtttttatgtttggttgatttttgtatttttagtagagacggggttttgttatgttggttaggttggtttggaatttttgattttaagtgattcgtttatttcggttttttaaagtgttgggattataggtgtgagttattacgttcggtttattttgtttttatagtattatttttataaagttaagataatgtgaagtgagtttttattgagttatttagaagattttatttgggaagaaaagaaaattatatttatttgaatttaattttatttgtttaaaaagttttgatattaagatattgaattgtattacgttttaggattataaaattttaatagtggatgcgtttaaataataggttagtatattttataaatgttagtagaataggaaagtttttttggtgtataaattaaatattagaaaagttgaatggattataataatttatgtaattattaaatagttaagtaattttagtttttgttatttgtttttattattttagttttttgtaattaaagtttttaaagtatttattaaaatatttgtaataatatggttgaagtaaaataatttgtaggaagtttttgataatattaaaatttgataggtagttttaattttttttttttatttttagt

SEQ ID NO: 200 - DNA, 8588 bp, Artificial Sequence
  chemically treated genomic DNA (Homo sapiens)
  unsure (2977, 3344, 3346, 4153..4154, 4159, 4171, 4173)
attgaaaataaagaaaaaaaattgaagttgtttattaagttttggtattattaaaaattttttataagttattttattttaattatgttattataaatattttaatgaatattttagagattttaattatagaaaattgagatagtaaaagtaagtaataaaagttgaaattatttagttatttgataattatataaattattatggtttatttaatttttttagtgtttagtttatatattaggaagatttttttattttattaatatttataaagtatgttaatttattatttaaacgtatttattattaggattttatggttttaaaacgtgatatagtttagtattttgatgttaaaattttttaagtaagtaggattaagtttaagtgaatgtgatttttttttttttttaagtagggttttttgaataatttagtaaaagtttattttatattattttaattttataaaaataatgttataaagatagaatgggtcgagcgtggtggtttatatttgtaattttagtattttgggaggtcgaggtgggcgaattatttgaggttaggagttttagattagtttggttaatatggtaaaatttcgtttttattaaaaatataaaaattagttaggtatggaggcgggtatttgtaattttagttatttgggaagttgaggtaggagaattgtttgaatttaggagacggagtttgtagtaagtcgagatgtattattatattttagtttgggtaagagaatgagattttattttaaaaataaataaataaagatagaatgatgttaaaaattaaaatgtggatatatagtaatttttattgtttatagtaatggttagtaggattataagtttaatatattttggtatatatgcgtttagtttttatagaaataatttagtttttatatttaaattatttaaattgttttaatttttaatgaattgggggattgaaataaagttataaatatatttattgaatatatgatttaggaaaaaaaattttatgggtaatatgtttaataagattttttaaattttaggtatttattggtaaggtaaaagttgtaaaagtttgtttatttttaaataaaaaagaattttaatagaaaaatgagttatttcgtttaaatatgtattggttaaaatttattagtttatatgtagtgttatttttttaagaggattttattttaagatgttggtatatatttatttttttgttgtttagaattataaaatatattttttttttgtttttttttaaagttaatgttatttaaatttaattggttaagttagtagtttttaatttttttgggggtttaagatgtttgagattttgaggaattaatagttttaatttagtttttaaaaatttacgattttgtatataattatagaggatttaggatattttgaaagttatttatggtatttttagtttagtgtatttagaattaataaggttagatttttatttttttttattttaggaattttcgtggattagaaaatgagtagttaatttttttatattatatttagataaattagtttggtagggcggaaaaaaagttattaatttttggttattttataatagtttaaaaatgtttataataataatggtagtaaattttattttaatgtaattgttttatttaaatataacgtttgttataatagattagaattttaaaagatgagttatttatgattgatatgatgtaaaaataatgtaaaatttaagaaattaggagtttaagaattggtttattattgataaaattgatgagattttaaaacgtttcgtagtaggtattaaataaacgtttttaaatagtagaatatttgttatatattataaaaaaattttaagatttaaatattgagaggaaatatatattttataaatgaatgtgtaaatttttttttatttttaagtattataaaatttaaaagattagaataattttaattatttgaggtttaaaagtaatgtttataaagtattaagatttatgtattaaaagtttttaaatatttcggttaaatattgaataaattttttatttatttattattatagttgaatgttaaaataaaaaaggattaagaaaatgatttttataagttttatttttaaatatattgtttttataaaatttttcgaattagattgatgtgaaaaacgagatttagaatagaaggatttaaatatagtagtttgttatttttagaattagcggttattttcgaaattatttatttatttttgaattgtatatagtatagaaatggcggttttgtggttaatgttaagtatatttagttttttaaattaaatcgtttttaaaatattttttttattaatagtagtgttttatatttaagatatataattagatagtaaataagttatagtgcgagaggtgtaattacgaacgtttatttttattgggttttttaattttaaaatttatttattggataatatatattagggattatttagtttaatggataatgtgattttataagtgatatttaatgttaatttttaaataaaatttagaaaattataatcgttgtttaataattttatattaggtgaaaaataagtcgttataaggcgaaagattgttttttaggttgtgtgggtaatcgttcgttttatttaggaaaaatatattttattagggttcgtttttttttcgttttttattcgaatcgatttgtagtttttttaattatagtatataggagtacgtatttatttcgtttttattcggaggaggtatttagattaggcgttttaagtttatcgtttttttttttatgtagtatggtttcggcgtgattagaggaggttcgcggttgagttagtattgaatgttttttttattatattatttttttttatttaatttaaatttatagatatcggnaatgaaggagaattagggtattcgttattgtataaggttatagtaaatggtttaattaatttattatatttaaatttttgaaaaggaattataagacggaattttatgtgtaggtttttgaaaaattgattttttttattttatatgttattttgtaaaatcggagagttttcgagtttttttgttggaggaatagggagtcggtagttttttttttttttattttaagttttttatcgagggggttacgtgatgtaggcggacgttttaatgttgttgtattaaatatttttggaaatttttatttttaataatttatagagatgtttttgaaattattttaatttttttttagttttagggggangngttttttttatttcgcgcggggttcgttttattattatatttttcgtttttttttatcgttattcgtatacgcgaatgatttagtaagcgtttttttttcgaggtcgttttttcgtttttattttttagcggtaaaagcggttttatttaatcgtaggtttcgttgtgggttcgtcgcgttttcggttcgttcgtcgtttttcgggttcgtttttcgcggtcgtcgtcgcgcgtttttacgtcggttttttttcgttcggttcgtcgcgtcgtcgttcgattttcggtttcgaagatatagtcgatttatttagagattgaattaattgtttttttttttttcgttgggggattagggcgagggaaggtggggaggggggagaggggacgaattaaggtgggttttagtttttttattttaaaaaaggaaattaaaaaaacggataggaaaagggtaaaaagagtttaataatatttattattttagggacgttttttttaatatatatatatatatatatatatatatatattcgtttttttttaaaaggggaattaatttggggaataaatgttttcgttcggttggggagtgagggaagggggagggaacggggttaagttttaaagatttagttttaggattttttagttataggagtagtagaagcggtaggagtagggggtgtagagtttatacggtcggggagacgttttgttgttagttgtagttcgatttttttttattaaaatacggtttttttttttacgcggtttcgggttggttttttttttttttaggttcgnnnaaantatcgttttttntnttgttttttagcgattggtggttattttttttttttttgggtggttgtacggattgtagtagtaaagattggaataggtatcgcgtcggggttgtagttattgttgtttttgttgatgttgtagttttcgttgtttttgtcgcggtcgttgtagtcgtttttttttttttttttagtgttttaaattcggaatcggttgaaatcggtttagattgggagattttatttcggttgagtttttagtttatggcgtcgcggagcgtttggaatttgggttttcgtttttagttcgtttttttattggttagttttagttatagtcgcgttatgagtttattttttattggttcgagcgttagttaatttcgttttacggttttatacgagttcgtcgtttcggtttttatttttttttagtagcgatttgttcgtagagtgggggaggggaagtggggagggtcgaaaggtaagaggagaggggtggaggaggaggaggtgggacgaagagtagggatgagtagaaaagagagcgaaggaaagtcgcgtggaggattcgttcgaacgagttgttaattaagagtagttcgttttcgagttttcgattttttttttttttgcggttttttttttttcggtgtttagttcgtaggttcggttttttcgttcgtttattggttgggttttttcggtgatagaagtttttcggtgaggagagggtggggcgtcgttcgtgagttggtggcggcgcgagtttgatcggggcgcgcggtagcgttttttttgtttttttcggattcggtcggttcgtttttatcggttttcgttaatttgcgggggtttgagttcgcgggaattaggattcgtttttcggatgggggttgcgttcggaaaagggagggtatatttagttttgaattttggaaggggtggagaaaagagggaaaaagaacgttttcgaggttaattttaggttttagatttttttaatttattttagaggtttggttttggggttaggtagttgagagaggggttggggtgaggcgtagggcgtgtatttttggcgtttcgtgatttttttagggtgtcggaaaagatatcgaaatattttttgggaaagtttttttaaaattttaattttgtttttttaggttggaatttggttgttttaataagtaattttttttgaaaattaaaatattgtaattttaagtgattggtttgatagcgtatgttttggttggttgagtttgtatgttaattgcgttttatttggtgtttttgatttgtaatatttagattttttttttattttagttgtattttacgtattaaattattattaaatagtattttttgtgaaagttatatgtacgttgttttttacgtggttgtttttcgtttgtttttaagcgttttttaaattagttttatagattgttttttgtttaagagtaaatagtttattaaaatttattaggttttttgtgttattaagaggtagataaatgatttattgaattaataataattttttttagtaaatgtttatttacgatggattatggttaattttaaagtattatttattttaattttttttttaataaagaaaaacgtaataatttaatgtttagatgtattagaattattttggatgatttttagatttaagtttttatttattatataaatgaataatattaagttattttatatatatatataatatatatataatgtattatgtatgatatatgatgtgtagtgggttttttgtattttgggttttttatttttagttttaattagttttgggtggaaaatattaaaaaataataataataataaaaataatataaaataaaacgtaatgtagtatatttatatagtatttatattgtataaggtattataagtaatgtagagatgatttaaagtttatatcgtataaggtattataagtaatttagagatgaaagtaacgggaagtttataaatatagtatatgtaaatatagtaaatttttatttaatatggttatggagaggattttggaaattgcgattttaaatataaggataggttaggtatggtggtttatgtttttaattttagtattttgggaggtcgaggtaggtagattatttgaggttaggagttcgagattagtttggttatatggtgaaatttttttttattgaagatataaaaattaatttggcgtggtggtgggtatttgtaattttagttattcgggaggttaagcggggagaatggttggaattcgggaggtagaggttgtagtgagcggagattacgttattgtagtttagtttgggtaatagaacgggattcgtttttaaaataaataaataataataaaaaaaatttataaggatatataataaaattaattttattataggtttgtaattttagtattttgggaggtaaaggtgggaggattatttgagtttagaagtttaagattagtttgggtaatatggtaaaatttggtttttattaaaaatataataattagttgggtatggtggtatgcgtttgtagttttaattattcgggaggttgaggtgaaaggattatttgagtttgagaggttgaggttgtatgagttgtgatgatgttattatgtagattgtatattttagtttgggtgatagagtgagatattgttttaaaaaaaattattaatttaattttgataaaagtgtgattgtgtatgatgttaaaatagggtgagagagaaaggatttttttttttttttttttttggaaaaagtattttattgtgttttttttaggttgaaaggattttttttgatttagttatttgagtagttggaattgtagatgtatgttattatgtttagttagttttttgtaaataaatatatatatatataatatatattatatattataaatatatatatatatgtaatatatatatatgtaaatatatatatataaatgtaaatatatgtgtgtgtgtatatatatatatatatatatatattttttttttttttttgtagaaaggggttttgttatgttatttaggttgattttaaatttttgtaggcgagtgatttttttgttttagttttttaaagtgttgggattataggtttgagttattttgtttagttaggatatttattttaagaaaaaattgatttgggaagataaagtatgggttgtatttttatttttattaagtttaatttagtgtggagaatatttatggaaaattatgagtattttgtttgtgatgttaagattttagtgaataatttacgtagagtttgtgaagttttaaattaattaggagtagaattagtagttgtttgtaggtgagttgttattttttgagaatatagtgaaaaagtaggtgataaggttgttaaatttaggagttatagtttgatagtttgagaaatttgtatagtttttttatgaggtgatattgaataatgggttttaagaattttttatttatggagaaatgagagaagtgtattatttaatttggattatttttagataggatagaggaagttatagttgttttggttgaagtatttttaggttaaaaataaaaataatgagatagggttataggtttgttgtaatagttagtttaggttgttgtaataaagtattatagtttgggtggtttaaataatatttattttttatagtattggaggttggaagtttgaggttagggcgttagtatggtttaggttttggtaaaggtttttttcgggttgtagatcggtgatttttttttgtatttttttgtgaagggggaaaaaaggttagagagttttttggggtgttttttataagaacgttaattttatttatgaggattttattttcgttatttattgatttttaaaggttttatttttttatattattatattagggtttaggattttaatatattgatttttaggggatataaatattttgttcgttgtaatatataagaagtaaaatagagtagggaaattaaagttggtatttgtggattgaaaagatatgttattttttttttgtataaaaatattttattatgggttaggtatggtggtggttgatgtttgtaattttagtttttgggaggttaaagtaggtggattataaggttaggagatcgagattatttgggttaatatggtgaaattttatttttattaaaaatataaaaattagttgggcgtgatggtatatgtttgtaattttagttattcgggacgttgaggtaggagaatcgtttgaattagggagttagaggatgtagtgagtcgagattatgttattgtattttagtttggtgatagagtgagattttattttaaaataaataaataaataaaaat

SEQ ID NO: 201 - DNA, 8346 bp, Artificial Sequence
  chemically treated genomic DNA (Homo sapiens)
attttaagattgttataggtttttaaatggattttaaggtatttttatttttagtaggtttagtttggtttttatttgtattttttaaaatagaatagatttattattaaaatgtttttattatagtttgtgtaggggtaaagattttagtttgtagaggtttttaatatagttaatgtttttttagagagttttttgaaatattgtttattttgggattatttgattttaaattttattaaattttattttgatatttatttattatttaataaatatttatttagtatttattgtacgttgtatattatattagagttttggagatattatttataatgtattttatttgttcgaattgatttgttattatggtttaaatggtattatgtgtgataattatgatggtgtgatatgattatatttggtttttgtttattttgtgttaggatttagatttatttgtttgtattttttagtttttaatagaaggagttgttttgtaagtttattttaatttaaaaattgtttagttgagattatagtatttagttaattttttttttttttaatgttttttttatttttgttaatatttttttatttttgaaaattttttttatttggttttttaagtatttttttttttttttaaaagaaaaaaaaaaaaaaagttaaattaatattatttggttttttatttatatatagtttttaatattttattagtgtattagtagttttatagagaaaaaagtattttttatttgtgatggttaattttaggtatttttttagttgggttgagggatatttagatagttggtaaagtattatttttgaatatgtttatgagggtgtttttggaagagattggtattttaattagtgaattaaagaagattagtttttatttaatgtaagtgggtattatttaattagttgagggtttggatataataaaaaggtagaagaaaggtaaatttttgtttttttttgtatttgggatatttcgttttttgtttttagatattagaattgtaggttttttattttttggattttgggatttttattagtgttattttaatttattaggtttttcggtttttaattttggattgagttatattattggtttttttgggtttttagtttatagatagtatatgatagtattttttagtttttataatttttagttaatttttatattaaatttttttttaattatttatttatttatttattttattggttttatttttttggaaaattttgattaatatattatttttgttttattggtatttttttgaattatagattaatgttaagtaattatagttggtgataaaatattttttttgtttataagttataggtgtgagagaaagtttggtatttggtagaagttgattttaaagtggatggatatttttttaataaattaaaatatattaaaattgaatgggtattttgaagaattgaggaggaatttgaagaaaattttgggtagggtatttttagtattagataaagtggattatttaatattaaaaattttattaaatagttaagaatttatttataggtaggaagaggatggaatatatgatagtgaaaggttaaattgtttttgattattttagtttggagataattattttaattattgaatttttatatttgtgtatgtggtattgtattagtcggtttttatattgttataaagaaatatttgagattgcgtaatttataaaaagaaaagagggtcgggcgcggtggtttatatttgtaattttagattttcggaggttaaggcgggtagattacgaggttaggagattaagattattttggttaatacggtgaaattttgtttttattaaatatataaaaaattagttagatgtggtggtacgggtttgtagttttagttatttaggagattgaggtaggagaattttttgaatttaggaggcggaggttgtagtgagttgagatcgcgttattgtattttagtttgataatagaggaaaattttttaaaaaaaaaaaaaaaaaaaaaaaaaagaggttagggaggttttttgattgtttattaaggtgatattagtttattggattaggttttttaattgtagtttgcgtatttttgttataatattaaatgataaagtatttaagttattttatatatgaatagaatttgagatataaaattaataatttagattaatagtttattagaaaaatagattatgaaaatgaataatttatatatttttttgtttttgaaaataaattttaattagtttgtttagttaggtttagtggaaattgaaattaattttatgggaagatagtttatatttttaatttttgttatttttggagttttagaggatgaatcgttgttgttaaattttcggattaggaaaatagttttagtgggtttttttgttttgttttgttgttgtttttttttttttagattataaagtaatatatgattattttagaaaatataataaaatagagatatagtataaaagaaaaaatattttaaattttattatttagaggtgaatatatttaataatttagtggatatatttttgtttttttgtaatatagatataaaaataggattatatgacgtaaattttttagttatttggttttttttattaaatattatattttggatatggttttatgtttataatcgtgtgtttatatttttttttttagtggttgttttatggtttattatttgaattattgtatttgattaattttttgttattagatatttgggtttttttttttttttttttagtattaattttgtaataacgacgaaattttatatatatatttttgtgtttatgtttaattattttttaagataaattttttgaagagagattattgtgttaaagagtttgtattttatggggggtttttaatttatattgtatattttattaatatagaatgtgtttgtttatatttttttatttagatgatttaatgtgtttttttattaatgtttttattttttttgtgggttaattatgaatgaaataaagtaagggggttgggatgggaggtagttgaaataaataagaaatttaaaaagagttttttaattttttttttttagttttttttatattttaatgtttttttttaatttggaattttggtttgattggttttatttttagtttatatattaattttttttgtttatgtttattttgtatttttgagattgggttagtttttttttattagcgagtatatatatttttttgaggtgagggatattatttttagtgttaaggtttggataatattattaaagggttattaagatatgtttaagaattttgaaattttagaattaggtttgttagaattagttgtttaatatagttttttatattgatttgttagttacgagaataaagttatatggaagttaaagatataggggtagtgtttagttgttggttggatatttttatatttttttttttgatttttaatgttttttgggtttatttttttttaattttttttttattagttcggtattgaaatgtttttgtttattttattttaaatgggtattattcggaggttatatttttatagtttattttttgtttttcgttttttttttgttttatgatttgggattatgatttttttttttttaaaatttttatttttagttttagatagttgatagttttgtataaatagtaatattttttcgtaattattgttttttttttttttttttattaaaaggggttggttaaagttaattttgtttagtttatgaatttaattttttttttttttaagattgatatagagattgacgtaaagagtacgttcggttcggttaaatttataagtatagaattaggtatcgtatgtttgtttatgtgatttttttttttttttttttttttttttttttttttttttttttttgagacggagttttgttatgttatttaggttggatggagtgtagtggcgcgattttagtttattataagtttcgtttttcgggtttacgttatttttttgttttagtttttcgagtagttgggattataggcgtttattattacgtcggtttaattttttgtatttttaatagaggtagggttttatcgtgttaattaggatggtttcgaatttttgatttcgtgatttgttcgtttcggttttttaaagtgttgggattataggcgtgagttattgtgttaggtttatgtataaaataaagtattcggaattttgtatttggacgtatttatattcgataatttttgttttaggaatttagggagtttatattaggtttttaatatttttgagattgaaggagggaaaaggttgtaattggtagcgataattgggtttagtaacgcgaattttagttttggttaaattttttttaatatatatgtgtaaagttatatttttatgaagagggggtaaaatatttgttttttgggtttaattttttattattttaaattaattgtgttaaaaatttttttgtttattaggatttattaaaaaacgtatatttttatttttatcgattttaagagaataattaattgttttatttttataaaaaatatataaagtgatataatttaaagattaatttttagataaaattaattgttaaatattggaggggtaaaaggggagattacgtcgtaaaagtacggagaggtaattttcggtatcgcgggaaggtttcgattacgttgcggtttcgttttttttttcgtttttcgttcggtagttcggtagtttcgcggtttttcgaatttttcgttttcggtttttgcgggcgtattttgtaggtttcgtttcggtttcgttttatcgcgacgttagttgttatgtttcggtttcggtcgcggtcgtcgttgatatacggttgtggagggtacggtcgcggttttcggaggtggcgggggtgttggggacgggtgttgcgatcggtattgtttattcgagcgggacgggcgttgagtggtcgggaggtagtcgggtagtcgtttggaggagtagtttcggggtttattattggtttttttttttcgagatcgattttatttgtagagatcgcgacgttttattttgggtcgggtcgtagtgttcgttcgtttgagaggcgtcgttcgttagtcggttcgagcgaatttggagtcgtcgtcgtgttcgtcgtttttttcgcggagtttgggcggtcggcggggtttggggtttgggtttcgggcgcggcgttgcggcggtcgttttttttcgcgtagaatacgttgggtttcgggtttggttcggtcgagcgtcgcgtttttttgattcgcggtcgcgggagttcggtttttacggtttttcgggtttcggtttgtcgttcggattttcgttttttgggcggatttgagttattttttggttttttttttttttttgagatcgcggtatcggagggtcgatttcgttatttgggttagtgttcgtttcgggggaagcgtttttcgttttgttttttttcgcgagtttttttcgcgttttttttttttttgtgtttaatggatgggggttttgagttttttttttttatttttgtcggtttttgattgggaggttcggcgcgaggttttgcgtttttgcgtttttcgtcgtcgtttcgcgttcgcgcggatttcgttatttgttttttcgtcggggatggtcggttagtgacggcgtcgggtggttcgcgcgtggatacggggttttcgtttaagttgttatcgagtcgcggttttcgttttcgatttttttttttttcgtatttcgagttttttggaaagagaggagattttagggaagatgtggttgaagtttttttttttgtttttttattttttggttttgttcgttttggttaggttttttgaggttattgtgtggtatgaaattggtatttttgttatttagttggtggattcggtggcgttgagttttaagaagttgaagattattttggagtgtcgggggttgggttatttagggttgttcgagaagaaggatgttcgggagttggtggaaaagttaggcgagtatcgggttttttttagggttttttttatttgggagaggggacgatttgtattttttggtatttggttgtttttttagagtgaggttttttttggaagcgttaaagttgtttaggttttttcgtttaagttttttataattaagtatgcggattttagttttgaggaggagtttgaaattatttggaggagtgttggtgtatttttttaaggttatcgtaaaatgatagtttaaagtgtggttttttagcgttgtttattaagttgagtgatttttttaaaattcgggaatattaattagttataaattggaaagtattatttgttagttgaagtttataaaaacgtaagaaaaattttaaaacgttgtttgttaatagtaatatttgttacgatagtaataataagatatttagagtggggatatatttttggaatatttattattagaggtatttgggtttaggatttaaatgttaaattatgagtttgaatatagatagtatatatcgtatagtattagttttttagattttaagtttggtgaaaataaggcgagtattttgtataaatgtttgttatgttcgagtttatattatattttttgttaggatttttaaaaatttgtattttggatgtgtaaaagaaaaattttttttgttttttgtgttataggtatttttgtattgtttaatgggttgagaaatatacgtgaaatagtgttgagagaatatttaatgttttaaagaatgtgtttttagtaattgttggttttggtaggattgggtgagaaatatggttaattttttttattgttgtataaagtatatttttggatatattttttgaaagtggaatgtaatttgagaaaggttttttgcgttgttgtgggaagtagttgaaattgatggttattttttttgttgttttaagtatttttgttagttgtattttttataagataaattttttttttttttagtattttatagatatgtagcgtgatagataagagtatgagttcgttagtagtttaatatttggatatttgtaggttgcgggttataaaatttatattttattattagggtagaggagaggaatatattttgtagaagtgataaatgtttttttagagaaaatataaaatcgtatattatttttgttttttgtttgttgattggtttatggcgatttttatttttattatagggggaagaagtggagtaattagggtaaaagatttttaataaataaatttttttggtttagagatgagaagtgttttaattgttaaagttattatttttttatggaaaataatttggttatatattttttttttttttgattgttatttattattgtttttttttgggtttaaaaatatttggtatattgaatgtattagaagtttatatttaattttaagacgtatagtttagtatgatttaaattatacgttttatggtagaaaagttatggtatagtagtttaaaatttaagtgtttattgtgaatggttttgttgttattatggtgtagtatttggttttttattgtttaatatttaaggcgaaagttaaaataatttgattttagtgttttttttttttttttgtttaatgatataagttttaaatttataatataaatttgtatatgaatatggagtttgttttgtttaataggtaaagttttaatttttaagttatataaattttgttgtttttttaagtagggttgatggtaaattttgtgaatttaattttatattttttaagtaagaagtatataagttatattgtttaaaaatgtatatgaagtttgtatgtgttatttataaaattaaataattaagaaagttgtgtttttttggagtggtataaatttggtaagtttttaataattatgtgataattttattaaaatataagttttgttttataagagatggatttttgtttattttgtttatttttttttgatgtataggaagtttttattatatatttattgaatgtatgatttttaagtgggtatatttaggtttttttagtagtttttgtttataaaatataatgaaagtataatattatgatttttaatagtgtaaaaaatagaattattgaaattgggaatttaggatttttgtaattttattagtgttattttttttttttttttagg

SEQ ID NO: 202 - DNA, 8346 bp, Artificial Sequence
  chemically treated genomic DNA (Homo sapiens)
tttgaagaaaggaaaagaataatattaataaggttgtaagaattttagatttttaattttagtaattttattttttatattgttaagaattatgatattgtatttttattgtattttatagataagaattattagaagaatttggatatatttatttaggagttatatatttaataaatatgtagtaagaattttttatgtattagggaaaagtgaataaaatagataaaaatttattttttatagaatagggtttatattttagtggggttattatataattattaggaatttattaaatttgtattattttaaaaaggtataatttttttaattatttagttttatgaatgatatatataggttttatatatatttttaaatagtatggtttatatgttttttatttaaaagatgtagaattgggtttatagaatttgttattagttttgtttaaaagagtaatagggtttgtatgatttggaggttagaattttatttgttagatagaataaattttatatttatatataaatttatattataaatttagagtttgtattattaaataaaaaggaaaggaaaatattaaaattaaattattttaattttcgttttaaatattaaatagtgagaaattaagtattgtattatgatagtagtaaaattatttataataaatatttaaattttaaattgttatattatgatttttttgttataaaacgtgtgatttgagttatattgggttgtgcgttttaaagttaaatgtggatttttagtatatttaatgtgttaagtatttttaggtttaaaagaaggtaataataaataatagttaaaagaaaaaaaaatgtgtgattaaattattttttataaaaaaatgatggttttggtagttgagatattttttatttttaaattaagagagtttatttattagagattttttattttagttattttattttttttttttatggtagaaataagaatcgttataaattagttagtaaataaggggtaagaataatatacgattttatattttttttaaagaaatatttattatttttgtagagtgtgttttttttttttattttaatagtgagatatgagttttataattcgtaatttataaatatttaagtgttaaattgttagcgagtttatatttttgtttattacgttatatgtttataaggtattaaagaaggaaaagatttgttttgtaaaagatatagttgataaaaatatttgaaataataaaaaagataattattagttttagttgttttttatagtaacgtagaaagttttttttaaattatattttatttttaggaagtatatttaaagatatattttgtgtagtagtgaaaaaaattaattatattttttatttaattttattaaaattaataattattaaaaatatattttttaagatattgaatatttttttagtattattttacgtatattttttaatttattaaataatgtaagggtatttgtgatatagaagataaaaaaaattttttttttatatatttaagatgtaaatttttaaaaattttaatagaaaatataatataaattcgaatatggtaggtatttatataaaatgttcgttttatttttattaaatttaaagtttgaaaagttaatattgtacggtgtatattgtttatatttaaatttatgatttaatatttaaattttaggtttaagtgtttttgatagtaagtattttaaagatgtgtttttattttgggtattttattattattatcgtgataaatattgttattgatagataacgttttggagttttttttacgtttttatgaattttaattgataaataatgttttttagtttgtaattagttgatattttcgaattttgagaaaattatttaatttagtaaataacgttaagaagttatattttaaattgttattttacgataattttaaaaggatatattaatatttttttaaataattttagatttttttttaaagttgggattcgtatatttgattgtaggaagtttggacgaagaaatttgggtagttttaacgtttttaggaaaggttttattttgggggaatagttaggtattaggaggtataggtcgtttttttttttaggtggaggggattttaggggaagttcgatattcgtttgatttttttattagttttcggatattttttttttcgggtaattttgagtagtttaattttcggtattttaaaatggtttttagttttttgaagtttagcgttatcggatttattagttgggtggtaaagatgttagttttatattatataatggttttaaaaaatttggttaggacgaataggattaggaaatagaggagtaagaaaaaaagttttagttatattttttttggagttttttttttttttagagagttcggaatacgggagagagaagggtcgagggcgggggtcgcggttcggtggtagtttgggcgagggtttcgtgtttacgcgcgggttattcggcgtcgttattggtcggttattttcggcggggaagtaggtgacgggattcgcgcgggcgcgaggcggcgacgagggacgtagagacgtagagtttcgcgtcgggttttttagttaagagtcgataaaaataaaggggaaaaatttaaaatttttatttattaagtatagaaaggagaggggcgcggggagagttcgcggggaagaataaaacgagggacgtttttttcggggcgggtattgatttaggtggcggggtcggtttttcggtgtcgcgattttaagggggagggggagattaaaaaataatttagattcgtttaggaggcggggattcgggcggtaggtcggggttcgaggggtcgtgggggtcggattttcgcggtcgcgggttaggagggcgcggcgttcggtcgggttaggttcggggtttagcgtgttttgcgcggggaggagcggtcgtcgtaacgtcgcgttcgaagtttaggttttaggtttcgtcgatcgtttaggtttcgcgagaagagcggcgggtacggcggcggttttaggttcgttcgggtcggttggcgggcggcgttttttaggcgggcgggtattgcggttcggtttaggatggggcgtcgcggtttttgtagatggaatcggtttcggagggaaaaaattaataataggtttcgagattgtttttttaggcggttattcggttgtttttcggttatttagcgttcgtttcgttcggatgggtagtgtcggtcgtagtattcgtttttaatattttcgttattttcggagatcgcggtcgtattttttataatcgtgtattagcggcggtcgcggtcggagtcgagatataataattgacgtcgcgatgaggcggggtcggggcggggtttgtagggtgcgttcgtaggggtcgagggcggggaattcggggagtcgcggggttatcggattatcgaacgaggggcgggaggagaggcggagtcgtagcgtggtcggggttttttcgcggtgtcgaaagttgttttttcgtgtttttgcggcgtggtttttttttttgtttttttaatgtttagtaattgattttgtttgaggattagtttttagattgtattattttgtgtattttttgtaaaaatagagtagttaattatttttttaaaatcggtgaaaatagaaatgtacgttttttgatgaattttggtgaatagggaaatttttggtatagttggtttgagatggtagaaggttaaatttagaaagtaaatgttttgttttttttttatgagaatgtggttttgtatatgtgtgttggaggaggtttggttaaaattggagttcgcgttattaggtttagttgtcgttgttagttatagtttttttttttttttagttttaagggtgttaaaagtttggtgtggattttttgagtttttaggataaagattgtcgagtgtagatacgtttaggtgtaaagtttcgggtgttttattttgtatatgggtttggtatagtggtttacgtttgtaattttagtattttgggaggtcgaggcgggtagattacgaggttaggagttcgagattattttggttaatacggtgaaattttgtttttattaaaaatataaaaaattaggtcggcgtggtggtgggcgtttgtagttttagttattcgggaggttaaggtaggagaatggcgtgaattcgggaggcggagtttgtagtgagttgagatcgcgttattgtattttatttagtttgggtgatatagtaagatttcgttttaaaaaaaaaaaaaaaaaaaagaaagaaagaaaagaaaaaaaagagttatatggataagtatgcgatatttggttttgtgtttataaatttaatcgggtcgagcgtattttttacgttaatttttgtgttagttttgagggaggaaggagttgggtttataaattgaataaggttggttttgattagttttttttgataaggaaggaaaaaaaaaatagtaattacggggaaatgttattatttgtgtaaaattgttaattatttgaaattaggggtgaaagttttaggaagaaagggattatgattttaggttatggagtaagggaggaacgggaagtaaagaatggattgtgagaatgtagttttcgaatggtgtttatttaaaataaagtgaataagggtattttagtgtcgggttagtgggggaggagttggaaggggatgggtttagggagtattgagaattagaggaggaggtgtaggaatgtttagttagtaattggatattgtttttgtgtttttagtttttatgtggttttgttttcgtggttggtagattagtgtgggagattgtgttaaataattgattttaataagtttggttttgaaattttagaatttttgggtatgttttggtgattttttgatgatattgtttaaattttgatattgaaggtgatgttttttattttaaaggaatgtatgtattcgttagtgaggagagattgatttaattttaaaaatatagaataggtatgggtagggaaagttagtgtgtgagttgagggtggaattagttaggttagagttttaaattggaaaaaaatattagagtgtgggagggattagaaagaaggaattaaagaattttttttaaattttttgtttgttttaattgttttttattttaatttttttgttttgttttatttatggttaatttataggagggataaaagtattgataagagaatatattgggttatttgaataagagagtatggataagtatattttatgttggtggggtatataatgtgggttagaagttttttataaaatataagttttttggtatagtaatttttttttaggaaatttattttgaggaataattggatatgggtataaagatgtgtgtatagaatttcgtcgttgttgtagagttaatgttggaaagaaaaaaggaagaatttaaatatttagtgatagaggattgattaaatatagtaatttaaatgatgaattatgaggtagttattaaaaagaaaaatgtagatatacggttatggatatggaattatgtttaaaatatagtgtttggtgaaaaaaattaggtgattgagaagtttgcgttatatgattttatttttgtatttgtattataaaaagatagagatgtatttattaaattgttaggtgtatttatttttaagtgatgggatttagaatatttttttttttatgttatatttttgttttattatattttttgaaataattatgtattattttgtaatttaaaaaaaaaaaaataataataaaataaaataaaaaaatttattaggattgtttttttggttcggaggtttagtagtagcggtttattttttgggattttaaagatgataggggttggaggtgtgggttgtttttttatgagattgattttagtttttattaagtttagttgggtagattaattagaatttatttttaaaaatagaagaatgtatgaattatttatttttataatttgtttttttaataggttattaatttgggttattggttttatattttagattttgtttatatgtaggatggtttaaatgttttattatttgatattgtggtaagagtgcgtaaattgtaattaaagggtttggtttagtggattagtgttattttggtagataattagaagatttttttaattttttttttttttttttttttttttttttggagagtttttttttgttgttaggttggagtgtagtggcgcgattttagtttattgtaattttcgttttttgggtttaagggatttttttgttttagttttttgagtagttgggattataggttcgtgttattatatttggttaattttttgtgtgtttagtagagatagagttttatcgtgttagttaggatggttttgattttttgatttcgtgatttgttcgttttggttttcgaaagtttgggattataggtgtaagttatcgcgttcggtttttttttttttttatgaattacgtagttttaggtatttttttatagtaatgtaagaatcgattaatatagtattatatatataggtataggagtttagtggttggagtgattatttttaggttgagatgattagaaatagtttgattttttattgttatgtgttttattttttttttgtttatgaatgggtttttgattatttagtaggatttttagtgttagatgatttattttatttggtgttggagatattttgtttaaggttttttttaagtttttttttagttttttaaggtatttatttagttttgatatgttttagtttgttagaagaatgtttatttattttagggttagtttttattaagtgttaggtttttttttatatttgtgatttgtgaataaagaaagtgttttgttattagttgtggttatttagtattagtttgtaatttaagaaggtgttaataaagtagggatggtgtattagttagggttttttagagaagtagaattaataggatggatggatagataggtagttgagagggaatttaatatggaaattgattggggattatgaaggttgagaagtattattatatgttgtttgtaagttggagatttagagaagttagtggtgtagtttagtttagggttgaaggtcggagaatttagtgagttggggtagtattgatggaagttttagagtttagagagtagagaatttatagttttgatgtttaagagtaggagacggggtattttagatgtagaagagagtaagaatttgttttttttttgtttttttgttatgtttagatttttaattgattggatggtgtttatttatattgggtgggggttgattttttttagtttattgattgaaatgttaattttttttagaaatatttttatagatatatttagaaatagtgttttattagttatttgggtattttttaatttagttgaggagatatttaaaattaattattatagatgggaaatatttttttttttgtagaattgttgatgtattgataaagtattgagagttgtgtatgaataagaagttaagtaatgttagtttggtttttttttttttttttttttaagggagaaagaaaatatttaagaggttaagtgaaggaaatttttaaagataagaaaatgttggtagaaatggaaggggtattagagagagagggaattgattaaatgttgtagttttagttgggtagtttttgagttgggataaatttataagatagttttttttgttgggggttgaaagatgtaggtaggtgggtttgggttttggtataggataagtagaggttaggtgtagttatattatattattatggttgttatatatggtattatttaggttatggtgataggttaattcgggtaagtaagatatattatgggtggtatttttagagttttgatataatatgtagcgtgtagtgggtgttaagtaaatatttgttaaatgatgagtgagtattagaataaggtttagtagggtttaaggttaggtagttttaagatgagtaatgttttaaggaattttttagggaaatattaattatgttaggagtttttgtagattaaaatttttgtttttgtataaattgtggtggagatattttagtggtgaatttattttgttttaaaggatgtaagtaaagattagattgggtttgttgaggatgaggatgttttaaaatttatttagaaatttgtaatagttttggggt

SEQ ID NO: 203 - DNA, 5898 bp, Artificial Sequence
  chemically treated genomic DNA (Homo sapiens)
atatatgtgaatattttatatatttagggattatatatattgagttataaaggttttgtatacggttatagttgtagagttatagatgttgatatagttttaaatgtgtgtgtcgggtgtggtggtacgtgtttttagttttaattatttgggaggttgaagtggaaggatcgatttagtttgggaggtcgaggttgtattttagtttgggtaatagagcgagattttgttttaaagtaatatatatatataaagttgtgtgtgtatatagttttagttataggggagggtagttatttttttatttaggtatttgcgcggagttatatatatttagttattgtagattttatagtggtttagagttacgtatagatatgtaggtggggatgaaaattttatgtttttaagaatgtcgttttagagataaattgtagtatagttataatagagtatttattttatatttagagatggttaaagtatatacggtatagtcgattatataggcggttttatatattgatttatatagttaagttatgcgggattgtatgtatatagtttttttataggaaattgggtatattcgtgttttttacgtttttttattgtatatttaggtatataggttttcgtagttttagatgttaaggcgtatatttttgtattcgtaagtatatatattgtttatataatcgggtatatatgacggttagtttaggttcgtcgtttacgtagtcgtaggttagggtatatacggttagcgtcgtttttggttacgttcgtttaggtttaggtaatcgcgttaggcgtatatacggcgcgagtatacgtgtcgcgggtatacgatttttagttcgttcgcgtattcggttagtttttatattttcgcgtttttcgttttcgtttgtttttttggaaattttgttttttttttttttttttttaggtcggaagtgttggttgtatttttagtttttttggttttcgttttttttttttttttttcgttcgtttaggattggttttagcgtttcgcggggggatttcggttatttttttttttatcgttattttagaggggattttcggtcgtcgttggggtcgcggattttttcgttggttacgtagggagtagggaggagttttgttatgaatttttttttggtttgggacgttcgagatttgaggggagggttgagggtttggttttttggatttgatcgaggataggttgggggtttttcgggtttgagggaggaggagttaggggtttgaatcgttggatttgagggaggaggagatgggggtttggatttttgggtttgagggaggaggggttggggtttcgggggatttgaggatttgagggaggaggggttggaggtttggatttttgggtttgagggagggggggttgggagtttttcgggtttgaaggaggaggagttaggggtttggatttttggatttgagggaggaggagttgggggtttggatttttggtttcgagggaggaggggttgggggtttggatttttggattcgagggaggggggtgttgggggtttggagttttgggtttgagggaggaggggttggggatttagggttttgggttattgcgagggaggagggattgaggttttggtttttgggttttttaggtttgtgggtttggggaggtggaggattagtttttttgcgagtaaagtattttttttttttgagagtggttttattttaaaagttttgatttttggggtcgatgatttagtagatgggagagaggagggggatagtttgatttagggatgggaaatgttttcggtttttagggagtagaaattggaattttttttttaggattgatcgtagttcgagttgagtcgggtttcgcgaatttaaggatgtttttaattttttttttttcgttttaattttttaagttgcgtaaggatttggagatcggtttagaggcgggttttaggttttttttttttttttttttttttcgttgtttttaaggttttgtttataggagacgggagttttggttataggagaggaattcgagtgttcgggttgaattttttcgttacggtttttaggaagtttttattttttcgttttttgcgagtgagttacgggcgagtaggaggttataatcgtgttagagtcgttcgcggttcgtttagtttacgagatcggttcgggaaggttttttagtaagcgtcgtattagggattttttttcgtcgttttcggacgaagtaggtcgacgtggagtttggtagaatttttttattttaatataagttcgtagtttgtaagaatgaattttttattattataattgcgtattgtggtaatgatttttatttttatatttttatttagggtatttagttttttagtattttttagaaaatagtttttttagattttaagagggtttttatttagggcgattttttgataataaaagatgtgttagtgtggggaatgatttttgaaaatgtagtttgggcggggtgcggtggtttatatttgtaattttagtattttaagaggtcgaggtaggtggattatttgaggttaggagttcgtgattagtttgattaatatggtgaaattttcgtttttattaaaaatataaaaattagttgggcgtggtggtcggcgtttgtaattttagttattcgggaggttgaggtaggagaattacgtgaattcgggaggtagaggttgtagtgagttgagatcgcgttattgtattttagtttgggtaataaaaacgaaattttattttaaaaaagaaaaaaaaaaggaggttcggtcggtttggtggtttatatttgtaattttattattttgggaggtcgaggcgggttgattacggaggttaggagatcgagattattttggttaatacggtgaaatttcgtttttattaaaaatataaaaaattagttaggcgtggtggtgggtgtttgtagttttagttgttcgggaggttgaggtaggagaatgcgtgaattcgggaggtggagtttgtagtgagtcgatatcgcgttattgtattttagtttgggcgaaagagcgcgatttcgttttaaaaaaaaaaaaggaaaatgtagtttgaaggtatattttattataagagatttatttagttattaattgaggatgattttttttttttttttgaaagttttttttaattaatgtaattattagttatagtgaaagatttttattttgttaattttgagtttttttagagggtaaatttcgatataattttagattttagtatgaggtttgtgttatttgttagttcgaattaggagagtaattttatttttttttttgagagggagtttcgttttgtggtttaggttggagtgtagtcgtttgatttcggtttattgtaatttttgttttttgggtttaagcgatttttttattttagtttgtttttttttcgttttcgagtagcgggattatagggtgtgcgttattatatttagttaatttttgtatttttgtagaaatggggattcgtcgtgttgtttaggttagttttagatttcgagttttagtgattcgtttgttttgggcgtttaaagtgttaggattataggtgtgagtcgggtaggagagtaattttattttggtttttttttgttttaaatgggtatattatttggtattaggattaatgtgcgtaaagtatttagaatttagtttaggtgagttttttttaatttagtttagaagagattattcgttcgagggtgagggggttagagtcgttttgtgaattgggaaaggaggtttttttttagttttgttaggtattttggattttatttaatttatttatttatttatttaattttagtaagtggggagagggagagtagtttaggtttttttatttgtttgggttgtttaggagtgagattatataaggtaggtagtttttagagaatttttttttaaggtttgttggtttttttttggtattttgttttgtagattttttttcgtaagtgtttattttttatagttttttttttttttgtttagtttttttttttttttaatttttttaaatagtattttttgtagatatgggattttattgttgtttaggttgattttgaatttttgattttaggtaatttatttgttttattttttgaaagtattgggattggtcgggtttggtggtttatatttgtaattttagttttttgggaggcggaggtgggaggatcgtttgagtttcggagttggagattagtttgggtaatatagggaaatttcgttttttaaaaaaaaaaaaagaagaagaaaaaggaaagaaaaatataaaaagtgttgggattataggtgtgagttattgcgtttagtttttttttgtttttttttgtgatttttttaatttttttttttttttgaatttgtttttgggattgtttttgttttttcgtttttttttttttttttattttgtttatttttttttgtatgttttttggtgtgtgtgtttttttcgatgtttttttttttgtttgtttgtttgtttgtatttttttgcgttttttttcgtttttattcgtttgtgtcgtacgcgtatttttatcgggtttttgtttttgttaattgtttttggggttttgtttttattttcgttttagtttttttttataagttttagtttttagttttgaaaattgggtaggcgtttttttattcgtatttttattttttttttacgtatttttcgttcggtcgcggttgtttatcggttaagtttaggcgcgttttggtttagggtcgggcggaagggaattagtttagggttagttaggttgcgtcgggggcgcgcgttcgggaagcgttttttttgtttcgttttcggtttcggtttcggtttcgtttcgtgtttgtagttttttataagtagtcggttttcggtgttagttttagtttgattttagcgtttttattttcggtcgatattttttatggttaatcgttatattatggatttgattgttatttacgaggtgagttttcgtcgtacggtattttcggtatttgtatgtttgagttcgagtttttatttttttagcgtcgtaaattttagttcgggacgtttgttttttttttttaattggggttttttagcgtcgcgttttttagtttggggtttttgtttttcgtttagattagtttggtgatttggaggtgaaaatggaattcgcgatattcggtttttcgtttaaatatgggtggggcggtttatgtaagtggaaagtcggagaattttttttagatcgaggttgtttggaggcggaagtggtttttatatttggtttatttttagtcgttgttgagggcgtggttttgcgcggaggcgtttttggggttgaagttttagggtggggggattcgatttttgtttttttagtttttgatcgtagagatagagaattttaaaatcgaagtaattcggatttttaggttaattttgttcggtttttttagttgtgaaattggagatttcgacgcgtgggttatattcggggaggataagagatttaaaattgggaaatagtggtgcgttttgatttcggggttttttttttggtttagtcggggaagtcgggatttttgggtttttcgggataaggtttcggtggtgggtaaatttagaatttttaattttgggtttttggtattcggaatttaggggtttttgcgggcgggtggggtttaggcggggagtttataaatcggtttggtaagttttagttttttgtagttggggtggggcgtcgttttgtatttttaggtgttttaatcgatttattttcgtaga

SEQ ID NO: 204 - DNA, 5898 bp, Artificial Sequence
  chemically treated genomic DNA (Homo sapiens)
tttgcggaaatgggtcggttaaggtatttgaaaatgtagggcgacgttttattttagttgtagggaattagagtttgttaggtcggtttgtgggtttttcgtttgagttttattcgttcgtagaaatttttgggtttcggatgttaggaatttagagttggaggttttgagtttatttattatcgaggttttatttcgagggatttaggaatttcggttttttcggttggattaagagggggatttcgaagttagggcgtattattgttttttaattttgggttttttgtttttttcggatatgatttacgcgtcgggatttttagttttataattggagaaatcgggtaaagttgatttggaagttcggattgtttcggttttagggttttttgtttttacggttagggattggagagatagaagtcggatttttttattttgagattttagttttagagacgttttcgcgtaaaattacgtttttagtaacgattaggggtgagttaggtatgggggttattttcgtttttaggtagtttcggtttgagaaaagtttttcgattttttatttgtatgggtcgttttatttatgtttgagcgaagagtcgggtgtcgcgggttttatttttatttttaaattattaagttggtttgagcgggaggtaggggttttaggttggagggcgcggcgttagggagttttagttggagaagggaggtaagcgtttcgggttggagtttgcggcgttagagaggtggggattcggatttaggtatgtaggtatcggggatgtcgtgcggcggggatttatttcgtagatggtagttagatttatggtgtaacggttggttatgaggggtgtcggtcgagagtgggagcgttgaagttaggttgaggttggtatcgagagtcggttatttataggaaattgtaagtacggggcggggtcggggtcggggtcgggggcggggtaggaggggcgtttttcggacgcgcgttttcggcgtagtttggttggttttggattggttttttttcgttcggttttgggttaggacgcgtttgagtttggtcggtggatagtcgcgatcgagcggggaatgcgtggggaaggggtgggggtgcggatggggggacgtttgtttagtttttaaagttggagattgaggtttgtagaaggaaattggggcggaggtgggggtagggttttaggggtaattgataagagtagaagttcgatgggggtgcgcgtgcgatatagacggatgggggcggggagagacgtagaggggtatagataggtagataggtagagagaaaaatatcgagagagatatatatattaagagatatatagagagagatagatagggtgaggaagggagggaagacggggagatagagatagttttagagatagatttagagggagaagagggttgggaggattataaaaagaaatagaaaggggttgagcgtagtggtttatatttgtgattttagtattttttgtgttttttttttttttttttttttttttttttttttttgaaagacggggtttttttatgttgtttaggttaatttttagtttcggggtttaagcgatttttttattttcgttttttaaagagttggaattataggtgtgagttattaagttcggttaattttagtatttttagaggatgaggtaggtggattatttgagattaggagtttaagattagtttgggtaatagtgagattttatgtttataaaaaatattatttaaaaaaattaaaaagaaaaagaaattggataaaaaggagaaagattgtgagaaataagtatttacggaaagaaatttgtagagtaaagtgttaagaaagagttagtaggttttggaggggaattttttgagaattgtttgttttgtgtggttttatttttaaatagtttagatagataaggagatttggattgttttttttttttttatttgttggggttgggtgggtgagtgagtgggttgggtggggtttaggatatttggtaaggttgaaaaggggtttttttttttaatttatagggcggttttagtttttttattttcgggcggatgattttttttaggttgagttaaggagaatttatttgggttgagttttaagtattttacgtatattaattttaatgttaggtggtatgtttatttaaggtaggaggaaattaaagtgaagttatttttttgttcggtttatatttgtagttttagtattttgggcgtttaaggtaggcggattattagagttcggagtttgagattagtttgggtaatacggcgaatttttatttttataaaaatgtaaaaattagttgagtgtggtggcgtatattttgtggtttcgttattcgggggcggggagggagtaggttggggtgggagagtcgtttgaatttaggaggtagaggttgtaatgagtcgagattaggcgattgtattttagtttgggttatagagcgagatttttttttagggggaaaaataaagttatttttttagttcgagttagtaaatggtataggttttatattagggtttgaaattatgtcgaggtttgttttttgagaaaatttaagattggtaaggtggaggttttttattataattgatggttgtattgattgaaaaaagtttttaaaaaaaaaaaaaaggttatttttagttgatggttggatgggttttttatagtggggtgtgtttttagattatattttttttttttttttttgagacggagtcgcgttttttcgtttaggttggagtgtaatggcgcgatgtcggtttattgtaagttttatttttcgggtttacgtatttttttgttttagtttttcgagtagttgggattataggtatttattattacgtttggttaattttttgtatttttagtagagacggggttttatcgtgttagttagggtggtttcgattttttgattttcgtgattaattcgtttcggttttttaaagtggtgggattataggtgtgagttattaagtcggtcgggttttttttttttttttttttttgagatggagtttcgtttttgttgtttaggttggagtgtaatggcgcggttttagtttattgtagtttttgtttttcgggtttacgtgatttttttgttttagtttttcgagtagttgggattataggcgtcggttattacgtttagttaatttttgtatttttagtagagacgggggttttattatgttagttaggttggttacgaatttttgattttaggtgatttatttgtttcggttttttaaagtgttgggattataggtgtgagttatcgtatttcgtttagattatatttttaaggattattttttatattggtatattttttgttattaaagggtcgttttaagtgaaaatttttttaagatttaggaagattattttttaaggggtgttggagagttggatgttttgagtgaaaatgtgggggtagaaattattgttatagtgcgtagttataatggtggaaagtttatttttgtaggttgcgggtttgtattaaggtggggagattttgttaggttttacgtcgatttgtttcgttcgagagcggcgggggggaatttttggtgcggcgtttgttgaggggttttttcgggtcggtttcgtgagttgggcgggtcgcgggcggttttggtacggttgtggttttttgttcgttcgtgatttattcgtaaggggcgggggagtgggggttttttggaagtcgtgacgaggaggtttagttcggatattcgggttttttttttgtaattagggttttcgttttttgtaaatagagttttgaggataacggggaaaaaggggggaggagggggatttgggattcgtttttaggtcgatttttaaatttttacgtagtttaaaggattgaggcggggaaaggggggttgggggtatttttgggttcgcggagttcggtttagttcgggttgcgattaattttggaggagggattttagtttttattttttggagatcgggagtattttttatttttgagttaggttgtttttttttttttttttatttgttgagttatcggttttaagagttaggatttttgggatagggttatttttaaaggagggggatgttttgttcgtagaaggattggttttttatttttttaaatttatagatttgggggatttaggagttaaggttttagttttttttttttcgtagtaatttagggttttgggtttttagtttttttttttttagatttaggattttaggtttttagtatttttttttttcggatttaggggtttaggtttttagttttttttttttcggaattaggggtttaggtttttagtttttttttttttagatttaggggtttaggtttttaatttttttttttttagattcgggagatttttaatttttttttttttagatttaggggtttaggtttttagtttttttttttttagatttttaggtttttcgagattttagtttttttttttttagatttaggggtttaggtttttattttttttttttttagatttagcggtttaggtttttaatttttttttttttagattcgggagatttttagtttgttttcgattagatttaggagattaggtttttagttttttttttagatttcgggcgttttaggttagaaggaagtttatggtaggatttttttttgttttttacgtagttagcgggaaaattcgcggttttagcggcggtcgggaattttttttggaatgacggtggggaaggggatggtcggggttttttcgcggggcgttggggttagttttgggcgggcggggaaagaaggaaaggggcggaaattagagaggttaaaaatatagttaatattttcggtttagggggaggggaggggagagtagagtttttagaaaaataagcggggacgggaaacgcgggggtgtgagagttggtcgagtgcgcgggcgagttggggatcgtgtattcgcggtacgtgtgttcgcgtcgtgtgtgcgtttggcgcgattgtttgggtttgagcgggcgtggttaagggcggcgttggtcgtgtgtattttggtttgcgattgcgtgggcggcgggtttgggttagtcgttatgtgtattcggttgtgtgaatagtatgtgtgtttgcgggtgtaaaggtgtgcgttttggtatttggggttgcgagagtttgtgtgtttgggtatgtagtgggggaacgtgagggatacgagtgtgtttagttttttgtgagaaggttgtgtgtatataatttcgtatgatttggttgtgtgaattaatgtgtgaaatcgtttgtgtgatcgattgtatcgtgtgtattttggttatttttgggtgtggggtggatgttttgttgtaattgtattgtaatttgtttttgaggcggtatttttaagaatatgagatttttatttttatttgtatatttgtgcgtagttttgagttattgtgggatttgtagtgattaagtgtgtgtaatttcgcgtaggtgtttgggtgagggaatgattgtttttttttgtgattgaggttgtgtgtatatataattttgtgtgtgtgtgttgttttgagatagggtttcgttttgttgtttaggttggagtgtagtttcgattttttaggttgaatcgatttttttattttagttttttaggtagttgggattaaaggtacgtgttattatattcggtatatatatttgaagttgtgttagtatttgtgattttgtagttgtggtcgtgtgtaaggtttttgtggtttagtgtgtgtagtttttgggtgtgtgaagtgtttatatatgt

SEQ ID NO: 205 - DNA, 11745 bp, Artificial Sequence
  chemically treated genomic DNA (Homo sapiens)
  unsure (2641)
agattacgtaatacgggtcggatgggtttggttgattttattgggtattatgatttttgggtttatgtatgacgttttagatgatcggttttttttttttttttttgatgtgttttttttgcgaattttatttttttgtttttttttagttatttgttgatgggtatttaggtcgattttacgttttggttataggtagcgtgtcgataattaacgtagtaggatatatatttgtattatatttcgatttcgtgtttttaggcgatacgtttagaagtgggatgattggacgtattttattggattggaattttagttttagcggtgattttttgagtaattttttcgtatcgttttcgattattttttgattagtttttattgtgttggtattttttatatttagttggttacggagttttgtttttaggttttatttttttttgcgttaggtttaagggggagatagcgagtttgagatgttttcgaaagtcgttagggcgtgatcggattttacggtatcggttttgcggatgttttattttttttcgtttgtttgttttttggcggacgttttcgcgtacgtcgttttttagattcgtttgggatagtttgcgtttcgtacgtttttttttttttttttttttttatcgagttttttttttcgatatttcgtcgggttttgtttagagtcgtgtgttttttttttgatttacgtgtttatcgagcgagcggggcggagggttgtggttatatatatacgatgattttattcgtagttcgtcgggatggttttgattttagagtaatattcgtcgggtatataaaggggaggagaaaattagatcgtgaggtttaggaggaattaatttaaatttggttggtcgtgggtaaaatgtggttttttggtttatttttttttgttgtttgtttttttatagaaaattaagttgggacgaaagtatattttgtttttttttaacgtcggtagatggatttttgtcgtcgtgttagaaaggagtttttttttcgtagattgtaggagtaagagaatttgcgggattcggtttttttttattcgaaatttgttcgattttcggtatggtgtgtatatatttaagtacgcgggcgcgtatatatatatatatatatatatatataggtacgtatatacgtaggtgtatattaggaagtggagaaatcgtttaacgtagaggtagagaggatttcgaaatgggtaacgaagtagggtattttttttgaaattatcgtgaagtttatagttatttttgtttttgttttgttatttcgtaaaattgtttattatttgcgggagatagagcggtagggatttagggagaaagcggaatttttttaattcgtttaatttaattaaggtagtttgtttttgtgggcgtgttcgtagttaatttttttgggaatttttagtagggggttttggttttttattaaagttcgtcggttgcgtttaatcggttattgttcggtttgcgttgtttaggttgttagaggttagagttttttcgtcgggaatatagagtttttttttggatggggaagttgttttttgaggagacgggagaagatagatttttttgtggaaagtaggggaagatggagatacgtaagattcgggagggttttgagagaggacgaggtgagtgagggtcgagtgtttcgtttgtgcggattggtgtgtggagggggtggtaggggttagggaggtaggagagttagagttggggtgataaaggtagcggttttcgttttacgggttttgattcggtaggtggtggggaaatttaaggttaaagaaaggtagattttttgtgtgttgggtggtttcgttagttgggttattttttgggtgcgttcgcggaggagggtttgttggagggtgttaggtagttggggaatagttagagttaggagataggaagggattcggggagtggggtttggaggttttgggtagttggagaaagaggagggggtgggggatatttgggagtagagttatttttgttttgaagttattttgggagtttggtttttgtaattttttcgtagtcgtttacggacgggttatggtttatttattgtcgatttttttttttttcgtattttttatcgggtatagtcgggaggtttttgcgtttaggtataaacggtggagaattttcgacggtttttttcgtagtttcggtagataaatcggaaatcgatggcggaaggttaagttacgattagttttattcggagagcgaggttacgataagttcgatttcggtagattacgacgtttttacgatcgtatatgatgtaggtttaggggttgggattttggatgggtggggaggatggcgtatggtttcgggaaggggagcggggagtggggggtttcgagggggtcgaggaagtttttagtgcgttaggaattcgggttttcggtggttttagatgatatgtgttttaagtttgaacgggcggaggggagggtatttcggacggggtatcggagtttttaggatgtagggaggggtcgagaggatggggcgcggaggcgagtcgcggaggggtgggggatggagggtaggggtgaggttggggcgcgacgganaatttgattcgattaggtatttttttttttattgtaaatgatttatggcgggggtattttatttttttttgtaaattatttatggcgaggtatttttttaagtttttatttgttttttttacgtttttttgtttgattaatattttttttttttttcggtgtttttaagtatgaatgataataaatattatatatatttatcgtgtgtgatttttttattagggaatttattagaattagtcgaatttatatagttatcgtcgtatttgttttttttgtttttgtcgggagaatttttaggtttattcgaatgaatatatttaatagtataatattatgttttgatttttcgtattaatttatttttattatatatatatatatgtgtatatatatgtatatatatatgtgtgtatatatgtatatatatgtgtgtatatatgtgtatatatgtatatatgtgtatatatgtatatatgtatatatgtgtatatatgtatatatgtgtatatatgtgtatatgtatatatatgtatatattatgtatatatatgttggttttaagaaaatttttgagaaattgaattgtttttttttttgatttgtgaggaagaaaggaaaggagaggtattgaaaaaaatattgtatttttttacgattttaatattaggaataattaaagttaggattatatttgaggtagaaataaagtaattgtttattcgtataaaggtgacgtttaaagaatattttgttaggaatatagtgtagggggtcgtgttttaagtaggtgaagagtaattttaagttattaattattttttagtttttattgagtttttagtttagtattgttggataataaattattattagttttagtggattaaagtattataaatttattattttatagattttgtaatttggaagtttgtgtatattatggttagggtgatggttaattttatcggttaatttgattgggttaaaggatgtttagaaaattggtgaaatattgtttttgggtttgttagtgtgtttttgggaaaagattagtatttgaattagtaaattgaataaaaaagtttttattaatgtgggtggttattatttaatttattgagggtttgaaaggataaaaaggaaaaggaagggtgaatttttttttttatttttttttaatttttaatttttgtgggtatatagtaggtgagtatatttatggggtatatgaagtagtttgatataggtatgtatagtgtaataattatattatggaaaatggggtatttatttttttaagtatttattttttgtgttataatttatttatattttgttatttcgaaatgtataattaaattattattggatatatatatttgtagtgttattaaatattaggttttatttttttttttttttttttttttttaaaaattcgttaagtatttttattttttttttattttttttttttttttgagttgggatatttattttttgttttttgatattggagattttggttttttggtttttggattttggatttatattatttttatttttttttattttttttttagtattttgtatagcgtagtatttaatttgtatatatttaatgaatgtaattaatgtatgaaatggcgtattaaggaattatttttttaagtgtttgattattttggtgaaatatttttattaaattcgggtttttacggaggagtggtgtgtttatttaagtttttgttttagttttttttattgtttttatattatatatgaaaagatttatcgtatattttaaagattaacgttttttttttataaaataatgttatttgttcgattaggttttttttcgttatgtttttaatttttcgtattttgtttttttaaagttcgtattaagcgttgtgattttcggatttttagtcgttggtcgtattgatatgtattcggaaaagtaattttaaattttgtaaaatatttttcggtagtgatgcgattcgaatttcggtagtgggttgttaggtttaggttagttttgtagtgcgtaacggaattcggtttcggttggttttgatcgtattatttttgtattttgtaagtaacgttttcgttagtttttatttttcgatttaattgttttagaagttttcgtattttcgttgtacggttgagtgtttgttaagatggtcgcgttcgtgcgttattatcgaagggcgtcgttatcgcggttgtcggattcgttaaggtcgtttttcgggtagtcgttatgtcggtttttagcggcgtttagattttgataaagttagagatcgtggatcggaggagaagtgcggaaacgattaaagaggtcgggcgattattggagatggttgtgttcgagttcgaggttagcgtcgcggtgagagttgtgatgagatagggtgttttggcggttagagatggtgtatttgcggggtagtgattggagtagtttgtgacgataggtgatttgggaattggtggaatcgatgttagatggttttttgggaggtcggtgttttgagttatttgtggggttaatgatttggttttaggatattagtattaggagggatttgtagagataatgatggggaggcgtttgtggtagttatcgagtgtcggagtttggaaggagattagaaatggaggttttgtgatgtgttagagatagggaaggatcgtgggggttggcggtttgggatgtttatgggagttagcgattatgggtgtttgtggtggttagagtttgggttattaaagagggttagtgttaggatttgggaaatttagtgattgggagtatttgggagtattagagattggggtttgggagttagtgacggtgatgtttgtggaagtttgattagtagtatttttgagggttagtgggtaatggaggaatcggggggttagtgaggggggaatatgattgttggagtttggggagttaatgttgaggtgtttttggggatggtagatgatttgtatgttatttggggagaaaaggtaattggggatgtatgtaggttaataattaggtggtgtttagtagtaataattgtgttttgagtaatgaggtgattagtaggaattaatgattgaagattttttatgattttgtgattagaagtttaagggggttaggagtttgaggggattgttgtatttaatgattgagggttttttggtggttagtgattggagatttgtggaggttaatgattgttttgtggagagtgatagttgggaatttgtagagatttataattgggagaagtttgtgaaggttagtgattggggagtatttgggtgttagtgattgaaaatttgtaggaatagtaggaatagtttgtaagatgagtatttattttatgttagggggtattttttattttatttgtttggtgttgttgttttgtagtttttgttttgtttttaaaattagggaatgttttaaatgttggagatatattaggaaataaaattagaattttttttttaatgatttatattatagaaatatgaaagatattataaaatataaataaataaaattattttagatattaataagtgttgaagtaagtaaaagaggatggtgtggtatagagtgattgagggtagggagtgtatgattttagttaggttagttatggaaagttttttttagtaaatgatagttgggttgaggtataaattattataaggaggtagttatgtagagatttgaagaaagagtgttttaggaagaaataaatattaattgtaaaggatttggggtaggagtaaatttggtgtgtttaaaaaagagaaggaagattagtgttgttggagtatagttagagggaaagtagaaagttgtgaattatagtggtaggaaggtattagataatgtaggattttattggttagtgtaaggatttggattttattttagatgtagtgagaagttattgagtttaagtaggggaatgatttgttttgattgatattttgaaaagattattatggttattttatggaagacggattgtagaggggtaagagtaggtagatatagggaggttagttaggaattttttgtaatagttaaagataagagattatggtgatttagaatagagttgtagtagtaaaatgaaattaaatttagaatatatttggagataagtaatagaatttattaatgtattgatatatggagtatgaggaaagagaagaatcgagatttatatttagatttttaatttgaagaatcggatggatggtgattttattttttgaatggaaagggttatggtggaaaagattagatttggtggatggaaatgggatttggggtgatgttagtggttttattttggtcgtgttaaaatgtttattgtatatttatttagagatattgggtagttattatatatatgaatttggaatttaggaaaggggtgagttagggaattatttttgaaatgtattataataaagatggtatttaaagttttaagattggttcgggttatttaggaagagaagatagatagggaagagaagagagttagggatagagggttgggttattttgatatttaaaagtttggtagaagataaaaaataatagagagaataaggggtgtttattgaagtaagaggaaaattgtgtaagtgggtgttaaagtagtatagagaagaaagttttttaagataatagaagtaattaattgttatatatgtttttgagttttaaaagtaggattagagattatttgattttgttagtatgtagtttaatggttattttgattgattagaatttttttattggagttaaggggataatattttgttagagtgagttgaaagaatgagaggtaatgaagtggaaatagtaagtataggtaatagttatgaggagttttgttggtaaaggaagtagagaaatggacgttgtataggatatgaaattaagagggggttttttttagatgaatgatattaagataattttgtgtgttaatgggaatgatttaaataaaagggagatatagatgttataaaatagaaagaggtatttgtaggagtgaagtttttgggaaggtagttggggatgggattgagagtataaatggagaaattggttttaggtgagagaaggaagattttttattttaatagaagagaaggtatattgtatatgagtttggaaataggttgttggaattggtggtaataagatagggtaatttttgtttatttggatttatttttttttgaaagtataaagtaaatttattagttaagagtgggaaaggagtagatgttggagtttttagagttaaaaaggagaatgtttaaaataattatttaggaaaaaggaaaggtgtattttttagggttaggtagtaggattattgataggattaggtgtttatttggtatgtgtgttataaatttgaagttagtttatttagtagtttgattttttttttgtaatgtttagttgtaaggttttaggtagagattaagaggagagttggatttaattaaggttgaggttttgataggtgagtatagtggagaagaagagaattaaggaagttaaaattttatagtttttaattgattgtgtatggtgttagaataaggaatttgaataagaaagaaaggttaggtaaaggtggaagattgtgaaaaagtggttaggattagagggtttaatgagtttggagaattattggagtgaaagtattagaaaaagtagtaggataggaaatgatggttagagggcggaatgttttagagatttttgtaggtggtatagtgatggtaaggtgtaagtgtagataattgatgaataggtggttgaatttgagtggaagaagaggttgttgattttatgaaaaagagaggtaagggtgttgaatggtttttttacgttgatacggaggtagtgtagtattatggtaggaatttagttggtgttaaagtttttagtgaattgggtgggatgattgtagaatagagttaatatagaagtgaaaaattgttatttttagataggtttgttgtaaggtttgttttttgttgttatttgggaaattagattttaggaaggattttattatttttggaattgattaagagtagtttcgagtgtttaaagaatatatagtgtggtttatgttgaatatttgtttttttttgggagtttggaatttttgtatatgtaggtagagagtgtttatttgattagtttttagtgaaatttttaggtagtattggtttttaatgagtttttttagtagataatattttatatatgttattataatttatttttagaggaattaagtatgttttatatgattttattgggagaggatttatggatgttggtgtttggtgttttgtggattttattttatgttgattaattgattttgtatatttttgttataataaataatagttatgagtataattatatattgagttatgtgagtttttttagtaaattatcggatttagaagggttaatggttgaaaatttggtgatattataaataagttatgaattttgaaggaagaatgagaaattgttgaaagtaattatttattttatttttagattttgaggtatatgggttatggtagggagaggggtggtgtaggaaagatagtttttatttttttgaggtttttataaggaagtaggatttttaggagataggtagattttaggtgaagtatgtaaatgaagggagtggttaaagaggttgagggaggagtggaatttgttggtagtaattagagtttttataaaggttattgtttgagaattttgtttagtgattggggattgataagatgagggatttggggtaataggagatagattattagtgttttgtgggtattattggttgaggaatttgtgagaatatgtgattggagtgtttgtgggggtaagtggttggggagatttgttgttgttattgattgggaggtttgttttatttagttattttggaattataggtttagtaattaggtaaggttgtttgtattagtttagtgattggaaggttagtgataattaatgatgggaaattattggtagttagtgattataggtttgtggggttaatttgatgatttttgtaggtaattgaatggtggtttggttaggtatagtggttgatatttgtaattttagtattttgggaagttgaggtggaaggattgtttgagtttaggagtttgagtttagtttgggtaatatagtaagaatttgtttttataaaaaaatttaaaaattagttaggtatgggtgttgtttgtttatagttttagttatttgggaggttgtggtgggagaattgtttgagtttaggaatttaaggtgtcggtgagttatgattacgttattgtattttagtttgggtaatagagtgagattttatttgtttttttattttattgtaaaaaaaagaaggaaaaaaaatttggttgtttgtaaggataagggattatttttaaatgttagataaatatgtttgaatatatttattagtattaaaattttttaatagttgtgtcgtttttttttatttgtttaataagaggattttaatatattttaattttttttttatttttatttttttagttagggttttgtttattttttaatattatattttttgattttaaggatatttttataatagttgtataagtatattattaagttatttagatttaattagatattttattggttgtattttttatagttttgttttgtatattaagttttttttaattttgaaatttttattttgatttatttttattttttttaaaaattatttattttttttttttgttgtttttttttttttttttttttttttttttttttttatttttttttaatttttttttttatttttaaagaatattggtagtgtatattttgtatttttatatgtttataatattttatttttgttgttaaatataaataattttttttttttttgagatggagtttttgttgtttaggttggagagtaatggtttgattttggtttattgtaatttttattttttgggtttaagtagtttttttttttttgttttttaagtagtcggaattataggtgtttgttattatgtttggtttatttttgtatttttaatagagattatgttggttaggttggttttaaatttttgattttatatgatttatttgttttggttttttaaattgttgggattataggtataagttattgtatttggtttataaatgatttttttgattggttataaaaattaagggttttaatttttttattttagaattataaatattgtttaatagttttttagtattttttgttatagaagaggagataaagattgattttgtttttttttttttttttttttttttttttggttatttgttttttttttcgatatgtacgtgattttatttttttgaataaataaatttataatagggatatttttgtttgtcgagatagggttttatttttttagttaggttggagtgtagtggtgtgattttagttttttgtagttttgattttttgggtttaggtgatttttttgttttagttttttgagtagttgggattataggtatgtattattatgtttagttacgttttgtatttttttgtagagatggagttttgttatgttgtttaggttggttttaaatttttgagtttaagtaatttttttgttttagttttttaaagtgttgggattataggtatgagttattatgtttagtttagtagggatattttttaatatggtttttgttttttaaaataatgaaaaattgagtagagaataggtattttttataatattatgattaatagtgagtagttaaggtaagaataaattattattttgtttaaattatttattaaatgtggataatattagtatgaataggaatatgttattataggtattagtaatatttaaatatgtgattatggtttttatttagaagg

SEQ ID NO: 206 - DNA, 11745 bp, Artificial Sequence
  chemically treated genomic DNA (Homo sapiens)
  unsure (9105)
ttttttgggtaaaggttatagttatatgtttgaatgttattgatatttgtgatagtatatttttgtttatgttaatgttatttatatttggtgagtgatttggataagataataatttgtttttattttgattatttattgttgattatgatattataaaggatatttattttttatttaattttttattattttgagaaataaaaattatattaagaaatgtttttattgagttaggtatagtggtttatgtttgtaattttagtattttgggaggttaaagtaggaggattgtttgagtttaggagtttgagattagtttgggtaatatggtaaaattttatttttataagaaaatataaaacgtagttgggtatggtggtgtatgtttgtagttttagttatttaggaggttgaagtaggaggattatttgagtttaggaggttaaggttatagggagttgagattatattattgtattttagtttggttgagagagtgagattttgtttcgataaatagaaatgtttttattgtgaatttatttatttaagaggatagaattacgtgtatatcggagagaaagataaatagttaaaaaaaaaaaaaaaaaagaaaaaaggaatagaattaatttttgtttttttttttataataggggatgttaaaaggttattgagtagtatttatagttttgaggtagaagaattgagatttttgatttttgtaattagttaaagaaattatttatgggttaggtgtagtggtttatgtttgtaattttagtaatttgggaggttaaggtaggtggattatgtgaggttaggagtttgagattagtttggttaatatggtttttattaaaaatataaaaatgagttaggtatggtggtaggtatttgtaatttcggttatttgggaggtagagggaggagaattgtttgaatttaggaggtggaggttatagtgagttaagattaagttattgttttttagtttgggtaatagagattttattttaaaaaaaaaaaaagttatttatgtttggtagtaaaagtaagatattgtaggtatgtaagaatgtagaatgtatattattaatgttttttagaaataaaggagaaagttggggagaaatagaggaagggggaaggggaggagaaagaggaaaagtagtagaaaaagagaatgaatgatttttaaaagaagtaaaaatggattagaataaagattttaaaattgggaaagatttaatatgtaagatagagttatgaaaaatataattagtaaaatgtttagttaaatttaagtaatttgataatgtgtttgtataattgttatgaaagtatttttaaaattaagaggtatgatattaaaaaataagtagaattttaattaggggggtgggagtagggaagaaattaaagtatgttgaagtttttttattaggtaggtgggggaggacggtatagttattggagaattttgatattaataaatatatttaaatatgtttgtttaatatttaaagataattttttatttttataggtaattaaatttttttttttttttttttttgtagtggggtgggggagtagataaagttttattttgttgtttaggttgaagtgtaatagcgtaattatagtttatcgatattttgaatttttggatttaagtaatttttttattatagttttttaagtagttgggattataggtaagtaatatttatgtttgattgatttttaaatttttttgtagagataggtttttgttatgttgtttaggttgggtttaaatttttgggtttaagtaatttttttattttagttttttaaagtgttgagattatagatgttagttattgtgtttggttagattattatttaattatttgtaaaagttattaaattagttttatagatttgtagttattgattattaataattttttattattgattgttattggttttttaattattgagttgatatagatagttttgtttaattattgggtttatagttttaaaatgattgggtaaagtaaattttttaattagtagtagtagtagatttttttagttatttgtttttatagatattttaattatatatttttataggttttttaattaatgatatttataggatattggtaatttattttttattattttaaattttttattttattaatttttaattattaaatagaatttttaagtagtggtttttatagaaattttaattattgttagtaaattttattttttttttaatttttttagttattttttttatttgtatgttttatttgaaatttatttgttttttgaggattttgtttttttataggagttttagaggagtggaggttgttttttttgtattatttttttttttgttatgatttatgtattttagggtttaaagatgaggtaaatgattatttttaataattttttattttttttttaaaatttatagtttatttatagtattattaggtttttagttattaatttttttgggttcggtgatttgttaggaggatttatatgatttagtatataattgtatttatagttattatttattgtagtaaaagtgtataaagttagttaattagtatgaggtaaagtttataggatattaggtattagtatttatgagtttttttttagtgaagttatataaaatatgtttaatttttttggaaatgagttataataatatgtatgaaatgttgtttattagggaagtttattagagattagtattgtttaggggttttattgggggttggttaagtaggtattttttgtttgtatgtataaaaattttagatttttagaagaaagtaggtgtttagtataaattatattgtgtattttttaagtattcggaattatttttaattagttttaggaatggtgggattttttttgaaatttaattttttagatgatagtaaaaagtagattttgtagtaggtttgtttaaggatagtagttttttatttttatgttaattttgttttgtagttattttatttaatttattgaaaattttagtattagttaaatttttgttataatgttgtattattttcgtattaacgtggaagagttatttaatatttttgttttttttttttatgaggttagtaatttttttttttatttaaatttagttatttatttattaattatttgtatttatattttgttattattgtattatttgtaaaaatttttaagatatttcgttttttgattattattttttattttgttattttttttagtatttttattttaataattttttaaatttattgagttttttgattttaattatttttttataattttttatttttatttagttttttttttttgtttagattttttgttttagtattatatataattaattaaaaattataaagttttaatttttttgattttttttttttttattgtatttatttgttaaagttttaattttggttaaatttaattttttttttaatttttgtttgaaattttgtaattgaatattgtaagagaaaaattaaattgttgagtggattaattttaaatttataatatatatgttaaatggatatttaattttgttagtagttttattatttaattttagaaaatatatttttttttttttttaggtgattattttgaatatttttttttttaattttgaaaattttaatatttattttttttttatttttggttgatgaatttgttttatgtttttaagagaaaataaatttaaatggataagaattattttgttttgttattattaattttagtaatttgtttttaaatttatatataatatatttttttttttgttaaaatggaaagtttttttttttttatttaaggttagtttttttatttgtgtttttaattttatttttaattgtttttttaaagattttatttttgtaagtatttttttttgttttgtaatatttgtgttttttttttatttgggttatttttattgatatatagagttgttttaatattatttatttaaagaaaatttttttttgattttatattttatataacgtttatttttttgttttttttattagtagaattttttataattgttgtttatatttgttgtttttattttattattttttatttttttaatttattttaataggatattatttttttaattttaataaaagagttttaattaattaaaataattattgagttatatattgataaaattaaatgatttttagttttgtttttaggatttaaaagtatatatgataattgattatttttattgttttgaaaggtttttttttttatgttattttgatatttatttgtatagttttttttttattttaatgggtattttttattttttttgttgttttttgttttttattagatttttaaatgttagagtgatttagttttttgtttttggttttttttttttttttatttgttttttttttttaggtgattcgagttaattttaaggttttaaatattatttttattgtgatgtattttaaaaatggttttttagtttattttttttttaagttttagatttatatatatagtggttatttaatatttttaggtagatgtgtaatgagtattttgatacggttaaaatagagttattgatattattttagattttatttttatttattaaatttagttttttttattataattttttttatttagaaaatagaattattatttattcggttttttaggttaaaagtttagatgtaaatttcgatttttttttttttttatattttatatattaatatattagtaagttttattgtttatttttagatgtattttgaatttgattttattttgttgttataattttattttaaattattataattttttgtttttgattattgtaaaaagtttttaattgatttttttatatttatttatttttgtttttttgtagttcgttttttatgaggtagttatggtgatttttttaaggtgttagttagaatagattatttttttgtttaaatttaatggttttttattgtatttagaataaaatttaaatttttatattagttaataaaattttatattatttgatatttttttattattatgatttatagttttttattttttttttgattgtgttttaatagtattaatttttttttttttttttaagtatattaagtttatttttattttaggttttttgtagttgatgtttatttttttttgaaatattttttttttagatttttgtatggttgtttttttgtgatgatttatgttttaatttaattgttatttgttaaggaaagttttttatgattaatttggttaaagttatgtattttttatttttaattattttgtattatattatttttttttatttattttagtatttattagtgtttggaataattttatttgtttatattttatgatattttttatatttttataatgtaagttattgagggagggattttggttttgttttttggtgtgtttttagtatttaaaatattttttggttttgaggataaagtagggattgtaaaataataatattaaataaataaaataaaaaatattttttggtataaaataaatgtttattttatagattgtttttattgtttttgtaagtttttaattattgatatttaaatattttttaattattaatttttataaattttttttaattatggatttttgtaagtttttaattattattttttatagaataattattaatttttatagatttttaattattgattattaaagaatttttaattattaaatgtagtaatttttttaaatttttgatttttttagatttttagttatagaattatagaggatttttaattattaatttttattaattattttattatttaaagtatagttattattgttagatattatttaattattgatttgtatatatttttaattattttttttttttagatgatatataaattatttattatttttagagatattttaatattgattttttaaattttaatagttatattttttttttattggtttttcgatttttttattatttattgatttttaaagatattgttaattaaatttttatagatattatcgttattgatttttaagttttaatttttgatgtttttagatgtttttaattattgaattttttaaattttaatattgattttttttgataatttaggttttaattattataggtatttataatcgttggtttttatagatattttaaatcgttaatttttacggtttttttttatttttgatatattataaagtttttatttttgatttttttttaaatttcgatattcggtgattgttatagacgtttttttattattgtttttgtagattttttttaatattgatattttaaagttaaattattaattttatagataatttagaatatcgattttttaaaagattatttagtatcgattttattaatttttaaattatttatcgttatagattattttaattattgtttcgtaagtatattatttttgatcgttaaaatattttgttttattatagtttttatcgcggcgttggtttcgggttcggatatagttatttttagtggtcgttcggtttttttggtcgttttcgtatttttttttcggtttacggtttttggttttgttagaatttggacgtcgttggagatcgatatggcggttattcggagggcggttttagcgggttcggtagtcgcgatggcggcgtttttcggtaatagcgtacgggcgcggttattttggtaaatatttagtcgtatagcggaagtgcggggatttttgggataattagatcgggaggtggaagttggcgagggcgttatttgtaggatgtaggagtgatgcgattagagttagtcggaatcgagtttcgttacgtattataggattgatttgggtttgataatttattgtcggagttcggatcgtattattgtcggaagatattttatagaatttggaattgttttttcgaatatatgttagtgcggttagcggttagaagttcgggaattataacgtttagtgcggattttagaaaggtaggatgcgagaaattggaagtataacggagaaaagtttgatcgaataaataatattattttatagggagaggacgttaatttttgagatatacgataaatttttttatatatagtataagaataataagaaaaattgaaatagaaatttaagtaaatatattattttttcgtgagagttcgggtttggtgaagatattttattagaataattaagtatttggagaaataattttttaatgcgttattttatgtattaattgtatttattgaatatgtgtaggttaggtgttgcgttatgtaaggtattggaaaaagagtggagaggggtagggatgatgtaagtttagagtttaaaggttagaaaattagggtttttaatgttaaaaggtagaagatgaatgttttagtttaagaaaaaagaaaaggtgggagggaagtggggatatttaacgggtttttaaaaaaaaagaaaagaaagaaggaataagatttagtatttgatagtattataggtgtatatatttaataataatttagttgtatatttcgaaataataaagtataaatggattgtaatatagaagataaatgtttgaggggatagatattttattttttatgatgtgattattgtattgtgtatgtttgtattaaattattttatgtattttataaatatatttatttattatgtatttataaaagttaaagattaaaaaaaaatagaaaagaggatttattttttttttttttttttgtttttttaggtttttagtggattaggtggtggttatttatattggtgggggtttttttatttagtttgttaatttaaatgttaatttttttttagaaatatattaataaatttagaaataatgttttattagttttttgggtattttttagtttagttaagttgatcgataaaattaattattattttaattatgatatatatagatttttaggttatagaatttgtgagataataggtttgtgatattttaatttattaaagttggtgataatttgttatttagtaatattaaattaaggatttagtgaagattgaaaaataattgatggtttgaaattattttttatttatttaagatacggttttttatattgtgtttttgatagagtattttttgagcgttatttttgtacggataggtaattgttttgtttttgttttagatatggttttgattttaattgtttttgatattagagtcgtaaaaaggtataatattttttttaatattttttttttttttttttttttataaattagaaagaggggtagtttagttttttaaggatttttttgaaattaatatatatatatataatatatatatatatatatatatatatatatatatatatgtatatatatatatatatatatatatatatatatatatatatatatatatatatatatatatatatatatatatatatatatatatatatatatatatatatatatatatatatatatatatatatatatgtggtagggatgagttagtacggaggattagaatataatgttgtattgttgagtatatttattcgagtagatttgaaaattttttcgatagggataggggaagtaagtgcggcgataattgtgtgaattcggttgattttagtgaattttttaatgaagaggttatatacggtaaatatgtatggtatttattgttatttatatttgaaggtatcgggaggggaagaaaatattaattaggtaaaaaaacgtaaaagagataggtgggggtttggggaggtatttcgttataggtgatttgtaggggaaagtgaaatgttttcgttataggttatttgtagtggaaaggaaaatgtttggtcgagttagattnttcgtcgcgttttaattttatttttgttttttattttttattttttcgcggttcgttttcgcgttttattttttcggtttttttttgtattttggggatttcggtgtttcgttcggggtgttttttttttcgttcgtttaaatttgaagtatatattatttggggttatcgggggttcgggtttttggcgtattgagggttttttcggttttttcggggttttttatttttcgttttttttttcggggttatgcgttattttttttatttatttaagattttagtttttaaatttgtattatatgcgatcgtgggggcgtcgtgatttgtcggaatcgggtttgtcgtggtttcgtttttcggatggggttggtcgtggtttgatttttcgttatcggttttcggtttatttgtcgggattgcgaggggagtcgtcggggattttttatcgtttgtgtttggacgtagaggtttttcggttgtgttcgatggaagatgcgggggaagaggaggtcgatagtgagtgggttatgattcgttcgtagacggttgcgggagggttgtaagggttaagtttttagagtgattttaaggtaggaatggttttgtttttaggtgttttttatttttttttttttttttagttgtttaagatttttaggttttatttttcgggtttttttttgttttttgattttggttgttttttagttgtttggtattttttagtaaattttttttcgcgggcgtatttagaggatggtttagttggcggagttatttagtatataaaaagtttgtttttttttgattttaggtttttttattatttgtcggattagggttcgtggggcgggggtcgttgtttttgttattttagttttaatttttttgtttttttggtttttgttattttttttatatattaattcgtatagacgagatattcgatttttatttatttcgtttttttttagagttttttcgggttttgcgtgtttttatttttttttgttttttatagggaggtttgttttttttcgtttttttaaaggatagtttttttatttaggaaagagttttgtgttttcggcgaggaggttttaatttttggtagtttgagtagcgtaagtcgggtaatggtcggttgggcgtagtcggcgggttttgatagggagttaggattttttgttgggagtttttaggaggattggttgcggatacgtttataggggtaggttattttgattaggttaggcgggttggaggggtttcgttttttttttgggtttttgtcgttttgtttttcgtaagtgatgagtaattttgcggagtggtagaatagagataaaggtagttgtgggttttacggtaattttaaaggaagtgttttatttcgttgtttatttcgaagttttttttatttttgcgttggacgatttttttattttttggtgtgtatttgcgtgtgtgcgtgtttgtgtgtatgtgtgtgtgtgtgtgtgtgcgcgttcgcgtgtttgggtgtgtgtatattatgtcgagagtcgggtaaatttcgagtgaagggagatcgagtttcgtaggtttttttgtttttgtagtttgcggaggaaaaatttttttttggtacggcggtaggaatttatttatcgacgttaggaaaggatagggtgtgttttcgttttagtttagttttttatggagaaataggtagtagaggagagtgggttagagggttatattttgtttacgattagttaggtttgagttggttttttttaggttttacggtttgattttttttttttttttgtgtattcgacgggtgttgttttgagattaggattatttcggcgggttgcggatgggattatcgtgtgtgtatggttatagtttttcgtttcgttcgttcggtgagtacgtgaattaaggaaggggtatacgattttaggtaggattcggcggggtgtcgggaggagaaattcggtaagagaagagagggagagggagacgtgcgaggcgtaggttgttttaggcgagtttgagaaacggcgtgcgcggagacgttcgttagaaagtaagtaggcgaaaggaaatggaatattcgtagggtcggtgtcgtgggattcgattacgttttgacggttttcggggatattttaggttcgttgttttttttttggatttggcgtagagaggagtgaggtttgaggatagggtttcgtggttagttaggtgtgggaggtgttaatatagtaagggttggttaaggggtggtcgggagcgatacgggggagttgtttaagaaattatcgttggaattgggattttagtttagtgggatacgtttagttattttatttttggacgtatcgtttaaggatacgaaatcgggatgtggtgtaaatatgtgttttgttgcgttggttgtcggtacgttgtttgtaattaagacgtggaatcgatttaagtgtttattagtagatgattagagaaggataaaggagtggggttcgtagaagaaatatattagggaaaggaaaggagagtcggttatttgggacgttatgtatggatttaaaagttatggtgtttagtgaaattagttaggtttattcgattcgtattgcgtgattt

SEQ ID NO: 207 - DNA, 6031 bp, Artificial Sequence
  chemically treated genomic DNA (Homo sapiens)
gtgagaaaatgaaagtatttaggaatgtttttattttgttttatatagtttttttattcgagttttttaagggtaagtatatttttgttattttttgtgtttagaattttaaaggtttttaatacgaaaataattattaaggtaagataggttgtagtaggttttttaagtgtaagatgtttggtgtttaattattaaatgtttttaaggattttaggtgtttttaaggttttattgtgagtatttttataaaatgtattttgtattttgttatattaaataatttttgatttttgttgtttatattttttttttatttttattttattatgagtataatattaagtgtatttttagtgaaatgatttttattattgtttttttattagttaaataatgttttttatagatttttataaatgggtttaaagtataattttatttttttttaattaaaaaaaatatagttgattttatttgtatagttatttataaaataattggattttataaagtttgttggattttaataaaggtttatttaatttaatagaattaggttattttttttttgttttttattaaagttaatagtttttttttgtatgaaaagtaatgataaagggttttttgaaagtattaatttttaaattatttgtgattttttaaattgagaaaattttttttttttttatgttttttggatattgtttttttaagtgttttatattggtggatgtataagtatttttgatggtaattatggaaaaattaataagaatggtgatattaggtttttttgttttgaatatgttgtttatagttgtatggatgaagtgaggttttattttttttttttttttttttttttaatagagacgaggttttattatgttatttaggttagttttgaatttttgggtttaagtgattttttcgtttcggttttttaaagtgttgtgattataggattgaattagggaatttggtttttatttttgttatatcgtagtattatattgaggtttttggaaagtatttaaacgttgattattaatgttttgaaatattaatgtgggcggtcgggtacggtggtttacgtttgtaattttagtattttgggaggtcgaggcgggtggattatttgaggttaggagttggagattagtttggttaatatggtgaaattttatttttattaaaaaaatagaaaaattagttaggcgtggtggtaagtgtttgtaattttagttattcgggaggttgaggtaggagaatcgtttgaatttcgaaggtagaggtttagtgagttaagattacgttattgtattttagtttgggagtgtaagaaatattaatgtgggtatataagttattttttatttttttttattgaaataatattgtttagttttatttatttttttgtgaaatgtttttttgtgaaagtttattatagtttgatgtaatttttataaataatgaatatatgttgttattatttttgaaaggaaatttaatcgtttggaaaaatttagattaaagtttcgagaggaaaattattatttagtgtatgtttagagatttttttttattttatttttgttttttttttttgaaagtatttgtgattgagagatgtttgagggaagggataaattgtattttgggagttttaaagagttatgttaggtaattaaaatacgtggtttttgtatttaaagagattttatattagtatattatttgttttataatttttgtgttttttattgtttaaaaatgtttttaatatttagtgttgtgttaaaggatagtatgttagattttagattaatgtaaagattttattatttaatttttttttagtaattttaaaatagagtttgggttttaagtttagtatggaaagatagtataaatatttaaattaagtaaagtgcgaaatatatatttttgaagttggtaagtgttgtttaattatttttttttttttttttaagttttttgaaattttaaaaggtttgtttaagtagtgtgtttaaaaaaaaaaaaatttatatttaattgggtttttttttattaaggaatgtggaaaatttatgatttatgaaacgatgatattagttttatattttataggtttttaagttttgaaatacgggtatataggaaaatatatagaaaatttttgttttttgtaacgtgcgaaacgttttaaaatgtaattttgtttatttttttttttcgtataaattaataaaattagtttggttttgattgtttatttttaaaaagtagacggtttggtaggtgttttagggataatttttttttttttattttattttttttttcgtatatttatttagattggtaagttcgtttttattttattttaaagattttttttttttaagcgaaggtaggggacggcgggggttgttaaatttatttttttttttagttacggggatgaagaaaatatatttattgcgggcgggggtttgagggtttgtaaataattcgagttggagtttcggttaggatcggcgcgagaggcggtaggtttttagggaggttttcggggggcggtcgcggtttacgggatatggtggggggcggtcgggtcgtttgttttttcgcggggtcggtcgatcgcggtttcgcgcgggttttacggtcgaggcggcggcggtagcggcgcgtgtgtggcggcggcgggcgggagcgcggaggaggtggaaagaaggggggcgttgttacggagatttcggtcgtcggagatttcgtcgtagcgaggttattgggtttttcggtcgcggggcgggagcggcgtcgatacggggtgttaggaggatttatcgggcggaggagggggtttgtttattttttcgtatttttttgggtttttttttcgggcggtgacgtgacgtgttgacggcgggttcgtgtcggggagttgggtcgttttttgttagtttcgagttcggtttttttttttttttttcgttcgttttattagtcggagttcggtttagtgttttagagaaaggtcggtttgtagtattcgttatcgtcgtcggtcgttcgtacgttcgttcggtgagtttcgggtgtcgtcgcggtcgcggggtttagtgcgcgtatagcggtttggtttcggtttggtcggcggttcgtaaggcgttttttcgcgttaggtcgggcggcgtggcgcgcggcgtcgagtaggtttcgaggaggtcgtagttaggttcggggaggagttcggttgtttcgagcggcggcggaggcgcgtttcgtaagcgggcgggggttgggggagggtcgttcggttgtgtcggaggcggtcgaggggtttcgggtcggtttcgcggtcgatttggggtatcgcgtcggggtgaggtttggcgaggaggcgaaggttgtaggcgtgaggtgaaggtcgtaggtcggtcgggtcgattttcgttatgtaaatatcggtgagggggggggagggacgggggataagatggcggcggttcggcgtttgttgtaggggacgatagagggggttgtcgggagggggagtcgttattttggaggcggtgtttggagagaaaatttcgttatagttcgtgagggggggtgggagagcgggcggcggcggtagcggcgtcggtgacgggtttcggaggttcggcgcggcggcgtgtgcgcgcggaggggcgtgttcgtttttcgtggcggttattgtttttgtcgttatgatgagcgttcgggttttaggcgttcggcggtagcgttatttttttgttttgtttttcgtagtttcgtgattggttgtagttttcgttgcgttttagttgagttgtcgtaggcggttatcgtcgtcgttcggacgtcgggatcgttttatttttagcgtttttggttttgcgttttttttcgcgtttgtagttattcgagggtagtcggggtaggtggtatttcggatatttgggtttattagggtatacgggattttaggaaatgttatttttgtttaagttaaattatatgtggttgttaaggtgttttcgatgtagttgtttttttaataatttttgtcgtttcgagtatttgaataaaggaagaaaaataaagattgatgggaaagtttttgttatttttttgttttatagggaaaaaaattgtataatacgagagcggaggaataaaattttgaattattcgtatttatttatgtggaaataatttttttgaaaaacgatttaagtagtgatttgttggtggtatttttttaaatcgaggaataagggtagatttttttatttttttattggaggataatttagtgtggtgtatatttattgtgtatttgtttgttatggtatttcgattttttatttgtgaagttttaaggcggagttttattttttaacgtatttttttgattgtatattgtgtaatttttttgataaattcggagtttattgttagcgatgtatcgtgttagatgttaagaaatattaaaaaggtttttgtaatgtagacggtggttgtaagaagttttatgtttagaggtaggtggggtaaggtgaaatgtagtaaagtgagaggtataattaattattgggattttcgagggaagtaaggttgttattggaggattagggagggacgggtttttgaagtattaataggtggtattttgagaaggttatcgagggatgggtaggattttgttaggtagaggtggaggtggagaaaggacgttttaagggtgaagtttttttagtaaatagtaagtatttatagtttggtaaaagtggatggtataggtaggggagtggtgggaatttaggttagaaaagttagattgtagaagggtttgtttgttaggtggaggggtttatatttaatggggtaggtagcgggggtgtttttaattagaagagtgatggtatatttgagttgtattttgttatttatttattttttattttgagataggtttttgttatattgttttaggttggtttcgaatttttgggtttaagtcgttttttcgttttttattgttcgtttgttattgtcgtttgttttttgagttgtgttttacggtatttagtagttttattggattaggaaaagttttaaagttgaaaaataatgagagtagtaagttgattagtgtttttattattagaacgattataagaatgtttagaagttaagtaaattttgttatttttggaacgatgcgtttttattaagatagttgttttttttttttattttgattttttattcgaaataattttttgtttagagttgttagaatttttatggtatataaatagggaggggtttttaatattttatttattatggttgaaaagtataggattagtgttgtgggttatttgacgaaaatgagaaatgagtattttcgtggtaatttttttttttttttgagattgaattttattttgtcgtttaggttggagtgtagtggtgtgattttggtttattgtaatttttgtttttcgggtttaagtaatttttttgttttagtttttcgagtagttgggattataggattttgttattatgtttggttaatttttgtatttttagtagagatagggttttatgttggttaggttggtttcgaatttttgattttaagtgatttgtttgttttgattttttaaagtgttgggattataggtatgaattatcgtgttttgtttgttttttagaattttatgatggaaatttttaggtggtatagatatttatttttagtttttttatttttttagattgtaataggtcgtgagtagcggtgttttatgaaagggttggagggaatgagagttttatgtttattataaagggttatggtttagaaaagttcgagaaatagtgtattgtatgaggttgattagaagtaagttgagaaggcgggttgtggttgttgaggtgttaagggtaaatataaatttagaagaattaggtgtttttatattttgatagt

SEQ ID NO: 208 - DNA, 6031 bp, Artificial Sequence
  chemically treated genomic DNA (Homo sapiens)
gttgttaaaatataaaagtatttggtttttttaagtttatgtttatttttaatattttaataattatagttcgtttttttaatttgtttttagttagttttatgtaatgtattgtttttcgaatttttttaaattatagttttttataataaatatgagatttttattttttttagtttttttatggagtatcgttgtttacgatttgttatagtttagaaaaatggaaaaattgaaaatgggtatttatgttatttaaaggtttttattataaaattttaggaaataggtagggtacggtggtttatgtttgtaattttagtattttgggaggttaaggtaggtagattatttgaggttaggagttcgagattagtttggttaatatgaaattttgtttttattaaaaatataaaaattaattaggtatggtggtagggttttgtagttttagttattcgggaggttgaggtaggagaattatttgaattcgggaggtagaggttgtaatgagttaagattatattattgtattttagtttgggcgatagagtgagatttagttttaaaaaaaaaaaaaaattattacgggaatatttattttttattttcgttaaataatttatagtattagttttgtattttttaattatggtaaatgaaatgttagaaatttttttttatttgtgtattatagaaattttgataattttgagtaaaagattatttcggatgagaaattaggatagaaaaaaggagtagttgttttaatagagacgtatcgttttaaaagtagtaaaatttgtttaatttttgaatatttttgtaatcgttttgataatgaaaatattgattaatttattatttttattattttttaattttgaaattttttttagtttaatggaattattaagtatcgtaaagtatagtttagggaatagacggtagtgataggcgggtagtgggaggcgggagaacggtttgagtttaggagttcgagattagtttggggtaatatagtaagaatttgttttaaaataaaaaataagtaaataataaggtgtagtttaggtgtgttattatttttttagttgagggtattttcgttgtttattttattgagtataagtttttttatttggtaagtaagtttttttgtaatttaatttttttagtttgaatttttattatttttttatttatattatttatttttgttaaattgtaaatatttattgtttattgaagaagttttatttttgaaacgttttttttttatttttatttttatttaataaagttttatttatttttcggtaatttttttaaaatgttatttattaatattttaggaattcgtttttttttgattttttaatggtaattttgtttttttcggaaattttagtaattagttgtattttttattttattgtattttattttgttttatttatttttaaatatgagattttttgtagttatcgtttgtattataagaatttttttaatgttttttagtatttagtacggtgtatcgttaatagtaggtttcgagtttattaagaaagttgtatagtgtgtaattaaaaaagtacgttaggggatgaaatttcgttttaaaattttataaatgaaaaatcgaaatattatgataggtaaatgtataataaatatgtattatattaagttgttttttaataagaaaataaaaaagtttgtttttatttttcgatttaaaaaaatattattaatagattattatttaaatcgttttttaagaaagttgtttttatataaatgagtacgaatgatttaaaattttattttttcgttttcgtgttgtgtaatttttttttttataggataaaagaatggtaaaaatttttttattaatttttatttttttttttttatttagatattcggggcggtaaagattgttggaaaaataattgtatcgaaagtattttagtagttatatatgatttgatttaagtaaaaataatattttttggggtttcgtatgttttggtaagtttaggtgttcggaatgttatttgtttcgattgttttcgggtggttataggcgcgggggaaggcgtagggttaggggcgttgagggtgaaacggtttcggcgttcgggcggcggcggtggtcgtttgcggtagtttagttgaaacgtagcggaaattgtagttagttacggggttgcgggaggtaaggtaggaaggtggcgttgtcgtcgagcgtttggagttcgagcgtttattatggcggtaagggtaatggtcgttacggggagcgagtacgttttttcgcgcgtatacgtcgtcgcgtcgggttttcggggttcgttatcggcgtcgttgtcgtcgtcgttcgtttttttatttttttttacgggttgtagcggaattttttttttagatatcgtttttaagatggcggttttttttttcggtaattttttttatcgttttttgtagtaggcgtcgagtcgtcgttattttgtttttcgttttttttttttttttatcgatatttatatagcgaaaatcggttcggtcggtttgcggtttttattttacgtttgtagttttcgttttttcgttaggttttatttcggcgcggtgttttaggtcggtcgcggagtcgattcggggtttttcgatcgttttcggtataatcgggcgatttttttttaattttcgttcgtttacggagcgcgttttcgtcgtcgttcggggtagtcgggttttttttcgggtttaattgcggttttttcggggtttgttcggcgtcgcgcgttacgtcgttcggtttagcgcgggagggcgttttgcgggtcgtcgattaggtcgagattaggtcgttgtgcgcgtattaggtttcgcggtcgcggcggtattcgggatttatcggacggacgtgcgggcggtcggcgacggtggcgggtgttgtaggtcggtttttttttggagtattgggtcgggtttcggttggtggggcgggcggagggagggaggaggggtcgagttcggagttgataaaaagcggtttagtttttcggtacgggttcgtcgttagtacgttacgttatcgttcgggagagagatttaggaaaatgcggaagggtagataggttttttttttcgttcggtgggtttttttggtatttcgtgtcggcgtcgttttcgtttcgcgatcggggagtttagtggtttcgttgcggcggggttttcggcggtcggagttttcgtgatagcgttttttttttttttatttttttcgcgttttcgttcgtcgtcgttatatacgcgtcgttgtcgtcgtcgtttcggtcgtaaagttcgcgcggggtcgcggtcggtcgatttcgcggagaggtaggcggttcggtcgttttttattatgtttcgtgggtcgcggtcgtttttcgggggtttttttggagatttatcgtttttcgcgtcggttttggtcgaggttttagttcgagttgtttgtaggtttttagattttcgttcgtagtaaatgtgttttttttattttcgtggttggggaggaagataaatttagtaattttcgtcgttttttgttttcgtttaaaaaaaaaaaatttttgaaataaaatgaaaacgggtttgttagtttaaatgggtgtgcgggaaggggggtggagtggggggagaagggttatttttagagtatttattaggtcgtttattttttaaaaataagtagttagagttaaattgattttattagtttgtacgggggagggagatgagtaaagttgtattttgaaacgtttcgtacgttgtaaagaataggaattttttgtgtatttttttatgtattcgtgttttagagtttgggagtttgtgaaatgtaagattggtgttatcgttttataaattatgaattttttatattttttaatagagaggagtttaattgggtatggatttttttttttttaaatatattgtttaaataagttttttgaagttttaaaagatttgggagagaaggggaaaatgattaaatagtatttattaattttaaaaatgtgtatttcgtattttatttagtttaaatgtttatgttatttttttatgttgaatttggaatttaaattttgttttaaagttattagggaaaagttaaatagtggagtttttatattaatttggaatttggtatgttattttttaatatagtattaaatgttaaaggtatttttaaataataagaaatataaaaattataaagtaaatagtatattggtgtgaaatttttttaaatatagaggttacgtattttagttgtttgatataattttttaaaatttttagaatgtaatttgtttttttttttagatattttttaattataaatgtttttaaaaaggaaaaataaaagtagagtaagaagaaatttttgagtatgtattggatgataatttttttttcggggttttagtttgaatttttttaagcgattaaatttttttttaaaaatagtaatagtatgtatttattgtttataaaaattatattaggttgtgatagatttttatagaaagatattttatagaaaggtaaatgaaattaagtaatgttgttttaataaaaaaaaatgagaaatagtttgtgtgtttatattaatattttttgtatttttagattggagtgtaatggcgtgattttggtttattgaatttttgttttcggggtttaagcgatttttttgttttagtttttcgagtagttgggattataggtatttgttattacgtttggttaatttttttatttttttagtagagatggggttttattatgttggttaggttggtttttaatttttgattttaggtaatttattcgtttcggttttttaaagtgttgggattataggcgtgagttatcgtgttcggtcgtttatattaatattttaaaatattgataattagcgtttaagtattttttaagggttttagtgtgatgttacggtatggtaagaatggaggttaggttttttggtttagttttgtaattatagtattttgggaggtcgaggcgagaggattatttgagtttaggagtttaagattagtttgggtaatatggtgagatttcgtttttattaaaaaaaaaaaaaaagaagaagaatagagttttattttatttatgtaattgtaagtagtatgtttaagatagaaaaatttaatgttattatttttgttagtttttttataattattattaaaaatatttatatatttattagtgtaaagtatttaagaaaatagtgtttaaggagtatgaaagaaaaagaagtttttttagtttaaaagattataagtagtttagggattgatatttttaaagagttttttgttattattttttatataggaagagattgttaattttggtgggaaataaagaaaggatggtttagttttattagattagataaatttttattaaagtttagtaaattttataaagtttagttattttatagatgattatatagataaggttaattatattttttttagttaaaaaaaggtaaagttgtattttaagtttatttatggaagtttgtaaagaatattgtttaattggtaaaagaataatggtaaaaattattttattagaagtatatttagtattatatttatgataaagtgaagatgaaaaggaagtgtaaatagtagagattagaaattgtttgatgtgataaaatataaaatgtattttatgaaagtatttataataggattttgaggatatttaagatttttgaaagtatttggtaattaagtattagatattttgtatttaaaggatttattgtagtttattttgttttgataattgttttcgtattagggatttttagaattttgggtataggaagtaataaagatgtgtttgtttttggggaattcgaataaggaggttgtgtaaggtaaaataaaaatatttttaagtatttttatttttttat

SEQ ID NO: 209 - DNA, 12138 bp, Artificial Sequence
  chemically treated genomic DNA (Homo sapiens)
tttttaggtttaagttattttttttttttattttttttgatggttgggattataggggtgtgttattatatttaattaatttttttttttttagtagagaaagagttttattttgtcgtttaagttggtattgaatttttggttttaaacgatttttttgtttttgttattttaagtgtgagttattatgtatagttatatttttttttttttttttttgagatagtttagttttgttgtttaggttggagtatagtgataagattatggtttattgtagttttaattttttgggtttaagtagttttttttttttaaattttagataattgattataggtatttattattatgattggttaatttttgtattgtttgtaaagatggggttttattatgttggttaggttgggtttaaatttttgggtttaagtattttatttgttttagcgttttagagtgttaggattattggggtgagttacggtatttaatttggttaaaaaattaaagtttgtgatgtttattagtttttgggaaataggtatttttatattatttgtgaaagttaataaatttttaagagtttttatcgagattattttagtaatattgttggttgtgatggtttatatttataattttagtattttggaggtagagataggtagttattttgaggttaggagtgaaagattagtttggttaatgtattgagatttttatgtttataaaaaaaaaaaaaaaaaaaaaaaaaaaaaagattatttaggtatgttggtaagtgtttgtagttttagttattttggagattgagatgagaggatcgtttgagcgtgggaggtcgaggcggtagtgagttatggttatattattgtattttattttgggtgatagagtaagattttgttttaaaaaaaaagaatattaaaaaaatttatatatatatatatatatatataaatatatatttatatatatgtttgtagaatggttttttattttatattgttttatttttttttttttggtttattagttattagttgtttttttatttttatattattgtagttaggattgaaggtatgtattattatatttggttaattttgtagttttttatagagatattgttttgttttgttatttaggttggagtgtagtggtgtaattatagtttattgttatggttacgtgattttttaggttttaatgattttttttattttagttttttaagtagttgggattataggtgtattacgacgtttagttaatttttaattttttttgtagagaagggatttaattatttgtttagatttgtttagaatttttggattttagtgatttttttttcgtggttttttaaaatgttgggattataggattaagttattatattaggtttaaattattttttagagtggattttttggattattttgtttatttgttttttaatttagttgatttttaagtttggtttttattataaaggtatgggaaattattgtgaaattatgggaatttattttttattttattaaaattgtgttaatattattattattaagagtatggttttgttttggttgtaggaagaaattggtatttgtaatttaagaaagtttattaacgtaaaggtgtggttatttttatagtgaagtgtaaaagaattttttgtgtttttgttagttttcgtcgtgataaaataggataataattagttaaatgtgttgttgaagaatgattgtttattatagtgaagattggattggtggttagtttttattataggtttaagtatatagtagggatatgtatatgacgtaaaattatatttaatttttttttatttaagattttgagtttgtaggtgttgtgttgaatagagttttagaatgtagtagttcgtggttggttttttatttgtttgagtttttttttttttattgtttgttttagaatgattaaattagaatttagttatttgtggtatagatgtttggttatatatatgagatattagtattatgtttttaggttattgatagtgatatttttttgtatttataaatatttgtaaatattagtagttattgattttgttaatgatagttgattaggtatagttttatttttttaagattttattttttagaaaattttaggatgttgagtgttagggtaaaaatataaagatcgtttgaagaatgatatgttgtttagttaggttgtaaagttgagtaataatagtaaataagttatgtggtagtttgggttaataatgtggaggttattgaatattggagattgttttttggtaagggagtgattaaagtagtgttttaagaagatttatttggttatagattgtaggaatgttttgttagttggtattataagattttttttttataataggttttttagttatttgttttggaagtgttataaaggttattttagaaattatttttatttttagggattagaaaataggaagtttagagtgattggtgataatgggaatataagtagggtaaatataatagagaaattgtggagaagaaattgataagatttgagaaattaattgttagggaaggaggaaaaggttatagtgattgtgttaggaaaaatttgggttttaatttttgaagatgtttagtaaacggtttgatggaaattttaggttttttttagcgtgtggattttggggattatttttacgtaagtcgttattaaaaattgtggaaataaatgagaaagtagtagagaggaaagttgaatgtgaaattttggataagattatagtagttatcggttaagaaggtgagaagagaattaagatattatataaataaagaggtaggagggagttttaaaattaaagaaattgattatttattagattttaatagataggtaaggaagatgaatatttgaaataggaaaattacgttataagttgatttttttttttttttttttgagatggagtttcgttttgtcgtttaggttggagtgtagtggtacgatttcggtttattgcgagtttcgtttttcgggtttatattatttttttgttttagtttttcgagtagttgggattatagatgttcgttatagtgttcggttaattttttgtatttttagtagagatagggttttattgtttgtattgttaagatattaggtggttttgattttttgattttgtgatttatttgttttagttttttaaagttttgggattataggcgtgagttattatgtttggtttataagttgattttttattagaattaatgaaattgttgtttttaggaaaattggaaggttattttaataatttaataaattatatttattttattatttattgttttaattttatgtggttttttttaattatgtagagaagattagtttgtatttataattttataattatatttttttaagaggggaaaaattaatgaagttagagattgtttgggtagagggagtagtgatagtttatttagagtaggtgttttttttttttttttgtggttgataaaatattagtgtagttattatggtttttttatttgaagtagtttgaatgttataaaatatattttttttaaattgagtagatttgttttagagaaatattttggaaatttattggttttttatttgtatattgttttattatatagtttaatatttgaaaattgatatatataagtgattatagtatgtgttaaaaatatagtaagggagttggatatagtggtatgtgttattagttttagttgtttgggaggttgaagtaagaggattatttgagtttaggagttggaggttgtagtgagttatgattatgttattgtattttagtttgggtgatagggtgagattttgtttttgaggggagagaatggggagggtttttaagttatatagaaatttgaggagtgtttataattattaggaattttgagttttttattattttgttaatttattgtagaaagattggagattatgttaaatatagagatgtaatatagttttgtagtaaaaatttatagaatgtgttaaagttgagagttaattatgggtgttagatataataatatttttgtaattttagtattttgtgaggttgaggtgggaggattgtttaagtttaggattttgatattagtttgggtaatatagttagattttgtttatataaaaagatattttaaaaattagttaggtttggtgatatatatttgtagttttaagtagttgggttgaggggtgagtattgtttgagtttgagaagttgaggttgtagtgaattgtgttatttatagtttagtttgtatgatagagttagaggttttgtttataaaaaaaaaaaaaaaaattatgggggttattgatagaaggtaagagggagttatttggtgtgtaagaaatgttttgttattttaatataaataatgtaagtattagttaatatttacgtatttaatataaataatgtaaattttagttaatatttaggtaaaaatttgttatgttaaatatttaagtattgtgaattttatataagatgataattgaattttttaaaaaatttaaataagttagatatggcggtttgtagttttatttatttagtaggttgagggaggaagaattatttgagttttggaatattaagttagtgtgaggaatatagtaagatttaaaatttttaaaaaataaaaaaatagaaatattgttaatttgatttgatttatttgtttttttttgttttgttgtagtttatgtatttttggaaattaatttgttttttttaattttatattgatagtttagtaaaaaataatttgagtattttagaaatgtgaatattatgatattttaatatgtgatataaaaattaatgtttggtatattttattttttggtttaggagttgtgattaatgagaattaaaggttatggatgaagatgaatttgaattgtagttataagagttaaatttattttttgatggaataggtattattatttattgggttgttttattttttatttgttagattttgaattatttattaaaattgtagaatttgatgttaatttatatttaggtatttaggtttatatttaggttttgttagaattttatagttaatttataattttgttagttaagttattaatattaaaattttattgttattttttagttattttagtttttttagttatgtaattaaagtttgttagttttttttttgaaatgttttttgtttgtgttagttttttatttttttattggtatattttagtaaatttattaatttaaaataggataaatttattttagagttttataggttagaaatgtggtttaattgagttttgcgtgtagaattatataaggttaaaattaagatgttggttaggtgtggtggtttatatttgtaattttattgttttggaaggtttaattgtgaggattgtttgagattaggaattggagattatcgtgggtggtggataatttaatggaaatttgtgtttatagaaaaaaaaatttttttttaattagttgagtatggtggtgtatatttttagttttagttgttttggaggttgaggtaggaggattgttttattagaagttaaaggttgtggtgagttataatggtatagttgtattttagtttgggtaatagaataagatagtgttttaaaaaataaataaataaataaataaataaataaataaataaataaataaaataagttatttgtagggttggaggtttttgatttcgaagaatatttatatttttagttaaatttagtttttttttgttgtataatggagatattgttgttttttatagtttattatttagggttattttttgtttttagagtttgtttatatttttttttatgttttgtatggtggttttttgaagtagtagtgagtggagtttattttatgtttttagtttttttgatttttttttttattatattcgtttttttgaatttagttagaaaattatttagtttaagagtttatatgattagatttgatgtattagggtaatttaagataattgtttaattttaagtttataattttaattatatttgaaaaattttttttgttatattaagtaatatatttttaagatttataaggattagtttatggatatttttgtgaaaggattattttttttgttattatttttatttcggtttttaaatatgtttttggtaaatgtaaaataatatttatttttttttaaagtttttagtttaaaaaaaaaaaattttatttgaaattaattagtttagaagttttaagtattatttaaattagatgtttattttttgggtattagttattaagtgtaatttttgggatataatttttttttatttgttttttaaagtatagtggtaggatagtttgggatattttggtttaaatagggtgatatgaaaggtaagagaaatttgtttgaagaaattttgaaatgtagttggataaatttttattaggttttaagatttgggaataattttttttggtttgtggtttcgttttttgagttttttttgttattttttttaaagatagtaggtatttgtagttgaatagttttattttttgttttttgtttttggaattttgttagtttaattgtttttattatattgattttgtgttttttttcgtttaagttagtagtgttttttttgaaaaaaattttgcgtgtgttatggggatttattgtattaggtaagaggttaatatattttttttttgagattattttatgtttgtttttgatttttgttaaaatggttgaagtttaatatttttagattttttagaggtgttgggtatgtgtaagttatatttttatttgtttgaaaaagatttaattttttggttttttgattttttttttttttttttttttatttttttttttttttttttttattttattttattttattttattttattttattttatttttttttattttttgttttttttttttttttttttttttttttttttttattttggttttttttttttttttttttttttttaatttttattttttttgtttaatgatcgggtgtttgaaggaattttttgttttttttgagggtttatggaatagttgagaattatatattgtttttttttttttttttaaattagcgttttttatttttttgagtattagggattggttttatggaagataatttttttagagatttgggagtagtggggttcgggggatagttattagatgaatgaagtgtattatatttattgtgtattttatttgtattattattatgtgtaatatataatgaaataattatatagtttattataatttagaattagtgggagttttgagtttgtttttttgaaattatgttattttatttgggggtaggagatagattattaggtattagatttttataaggaatatgtaatttagattttttacgtgtgtagtttatagtacggtttgtatttttatgagaatgtaatgttgtttttgatttgataggaggcgagagtttaggtagtgatgtcggtgatgggaagtggttgtaaatatagatgaggttttgttttgataaggaatttttttaatttaatttttttttttatttttatttttttttcgtttttaagatggatagaaaatttttgattttgttatgttttgttatttttttgtttaataaatattttaattatttattttttttattgaattttattttaagtattaagtagaaataagattatttgtttaatattttgttgaaattttttgagttaaagagttgatttttataagttgttttttttatataattaagggagataattttgttaagtggtttgtttttaagttgtgttttttatataatttagggagatagttttgttaagtggtttgtttttttatgtaataaagttttttttttttttagatagaaatttatttttaagtttttataagtagtgttataaaattttagatttttattagtagttatatatgacgtaggtattttttgagtttatgtaggatttttttattttgattttttttttttttggatttttattggtagagttgttattggttttttttttttgtttttgagatagggttttattgtgttattagggttgaagggtagtgatatgattatggttttttattgtagttttaattttttgggtttaagtgatttattcgttttagttttttgagtagttggaattataggtatatattattatgtttggggaattttttaaaatagagatgaggttttgttgtattgtttaggttgattttgaatttttgagtttaggttatttttttattttagttttttaaagtgttgcgattataggtatgagttattgtgttcggtttgttatttttaatatttatgtttttatttattggtttatttaaggaaatttaggtttttttttatttaatagaatttaagttttttattttgtaaaaataatttttttttttatttttttaagagttggaatttttttttatttttgtaagaaattttatagttggtatttatttaagtgtaaagttattttacgtttttaggtatttgtataagtagttttttatttttcgatattaaaatttgaaattatttttgttattgtaatgaaaattattataaatttagtagtttaaaataaatttattgttttatagtttttgtaggttagaattttattatggtgtagttagttttataaggtattgttagaggtttgtttttttttggtgaatttagttttattgttttttggatgtatttaatttgaggttatttaggttattggttgaatgtagttcgttgtagttataggattgaagtttttatttatgtgttggttgtgagttaataggttagtttttgttttttttgataaaatttgtgttgttttttatgttttttatgtggttattgtaggtaaggttaattcgattttttttatatataaaatttttttaatttatgattttgttttaattttttaattttagatataaaaagttttttgtttttaagttttatttgagcggattgtgtttaataaattatttttaaagtttatgattttaattttatttgtattgtttatgtggtatataagttataatataatatatttataagttttagtgattagagaataaatattttggggatttggttggtggggtatatggtggggtgtagattgtttggggtgttgagagaagtttgtttatgatatagttttttttttatgttagtttttagggttatataggttttattattttatttttaattgataatattaagattttttttttatttttggttttttttttttatttattttagtggtagaatatttagtttcgaaaaatatgtggattatatttttttattgtttaggaaataaattataaattttaggttttttggaattgattttgttcgaatttttgtaatttttttatatgtttataaaaggagtttttatattatgtagatgtatttttattttatttttaaaattgtaaaaagaaaattatatttaaataagagggggaaaaaagtatttttaattttagattggttatggttttaaatatataatgttataattaaattagattttatttttttgttttatattttaagttaaaattttaatgattgtattaattgaattttaaatgaatattgttatatattagtaatagtaattaattttattaagaaacgtaaggaattttaaatatattttttaaattttgtgtgtgtgcgtatatttgttaagtaatttaggatatttttttgatttatcgttaagtatttttaggttgttaatggtaaatgtagatttataattttttttttttttggaatatagtgaaatataattattttgggaggttatagtaagagggttgtttgtggttaggtttttaatattagtttgtattatttttttagattttttgtttgaaagagagattaagtttttagggaaaatttagtattttttagtgtaattttgttataattaagtttgagttagggttaaatggtagattgaagggttattgtattttagttttgattgttaatatttgaaatggtattttttttaaatttgaggaagttatgtaatttgtttaagtttttatttttatatgtatgataataatgaaatatttgattatattttttttaggatatttattatgtattcgtatttggttattatagttttgtgaggtgcgtatgatagatattattgatattattttattgttgaggaaattgaatttagaggttagatgatttggtttaaggttataaaattattaagtatttatattttgttttttgatttagattattataattagtgttgttgttattaaatgttattaaatttatatttgtgtaatggggattatattgttttattgttgtttattattatgaatatagaagataaatgagtagaaaatattttgtagaagatgtataaaaataaaagtaaatatttttttaatatataagttaagtaggttttaattattttaaagattttttgtaatatttattgttggtttgtttttggtgattatttttgttgaagaagttgtgtgtttatttgagggttttgttataggtatataattatcgagttgtgtatttatttggatttagtttattttgagttataattagaaatattaattagataaatagttttttttttttttttttttttttttttttttttttttaagaaaaattcggtgaggtagtgagagtgtagaaggaaaaagagaaattttaattgtttgtgatacgtgaatagtttttaatagttatttatgtttgtttttttttatgtattagtagttataatgtttgatttgttttatattaggttatatttttgttaaagttgtatgaattttttttttatttgtggtgtttatttagaataatatttattgagtatgatgtgttgtgtaagttgtgtgattttggttaagttatttgattttagtgggttttaattggtttttatttttttatttttattgtttaattgtatttagtattagaaaatgtttttatatattttgaggaattattttgggatttggggttagtgggaataggaggaggatagatggaggtggaatattttggtaaaattagggtaggttttattttaattatttttattttttattatttagtttagtttattttatttatttatagaaatttttaaatttaatgttttttttttttttattttttttttaatttttattttgatttttttgttttagatttaaagaattattttttaattattaaagttatagtggatattgatgggatattgtattaggataaagtgggaagattataagggttgaaagagaaaaaagaaagggtaaaaacgagatatgtaggtataatgaaaaaaaaaaaagtaatgtgttaagaaaggagatgatgaaagaaggaagagaaatgaatgaaatatgtaatgaagaaatagtatatttgttttttgaatttgttgtttaatttatataaaaattttaagattttattttagtggggtgagaaattttttattttgatgttttaaaagtattttataaatagtttttttttgttattgttttaaggttttttttatttttttttttttgttagttgattttatattttttttttatttttgtatttttttttttgttagttgattagggttgagtaaaataaatttttatgttaaaaatttgtttgttaagtgaattaaaagtggatttatttttttatttattgttttaatgtttgaggaatattaaggatatagtttgtttttttagaagaaattaaataaaaattatatttagttatgtatatttatttgagatttgttattttaatttttattttttaagg

SEQ ID NO: 210 - DNA, 12138 bp, Artificial Sequence
  chemically treated genomic DNA (Homo sapiens)
ttttaaagaataaaaattaaaatgataaattttaggtaagtatatatgattaaatatagtttttatttaattttttttgggaaaatagattatgtttttggtgttttttaaatattgagataataaataagagaatgaatttatttttgatttatttaataaataaatttttaatataaaaatttattttatttaattttaattaattaataagaaaagaaatataaaagtaaaaaagaaatataaaattaattaataagaaaagaaaaataaaaaaaattttggggtaatgatagaaaaaaattatttgtgaaatatttttaaaatattaagataaaaaattttttattttattaaaataaaattttgagatttttatataagttaaataataaatttagaaaataaatatattatttttttattatatgttttatttatttttttttttttttttattatttttttttttaatatattattttttttttttttattatatttatatatttcgtttttattttttttttttttttttttagtttttataatttttttattttgttttggtgtaatattttattaatatttattataattttggtaattagaaagtaattttttgaatttaagataaaagaattagggtagaaattaaaagaggaataaaaagaggaaagatattaggtttagaggtttttatagatagataaaatgggttgggttgggtggtgaagggtgggggtggttggagtggggtttgttttaattttgttagggtattttatttttatttattttttttttgtttttattaattttaaattttaaggtagttttttagaatatataaaagtattttttagtgttgggtgtagttaagtaatgaaggtagaagggtgagagttagttaaagtttattgagattaaatgatttaattaagattatataatttgtatagtatattatgtttagtaaatattattttaaatgaatattataaataggaagagaatttatataattttaataaaaatataatttaatatgaaataaattaggtattatggttattagtgtatagagaaaagtaaatatggatgattattaaaagttatttacgtattataagtagttaagatttttttttttttttttgtatttttattattttatcggattttttttaaaaaaaaaaaaaaaaagaaaaggaaaggaaaaaaaggttatttatttgattagtgtttttgattgtaatttagagtaagttgagtttaagtgggtgtataattcggtgattgtgtatttgtggtaaagtttttaaataaatatatagtttttttaataaaaatgattattaagggtaaattaataatagatgttgtaggaagtttttaaagtagttaaaatttatttaatttatatgttgaaagaatgtttgtttttatttttatatattttttataaaatgttttttatttatttgttttttatgtttataataatagatagtaatagaatagtgtaatttttattgtatagatataaatttgatagtatttagtggtaatagtattggttataatggtttaaattagagggtaaagtgtagatatttaatagttttgtgattttggattaagttatttaatttttgagtttagtttttttaatagtaaaatgatgttagtagtatttgttatgcgtattttataggattatagtgattaaatgcgaatgtatggtaagtgttttgaaaaaaatgtaattagatgttttattattattatgtatatgaaaatgggagtttgggtagattatatgatttttttaaatttaaaaaaaatattattttaagtgttaataattaaggttaaaatgtaatagttttttaatttattatttagttttgatttaggtttgattgtggtaagattatattaaaaaatattgagttttttttaagaatttagttttttttttaaataaaaaatttgaaagggtggtgtagattggtgttaaaaatttggttataagtaatttttttgttgtggttttttaaagtaattatattttattatgttttagagaaagaaagaattataggtttgtatttattattaataatttgaaagtatttaacggtgagttaaaagaatattttaaattgtttagtaaatatacgtatatatataaaatttagaaggtatatttaaaattttttacgttttttggtaaagttaattattattgttaatatatggtaatgtttatttaaaatttagttaatataattattaaaattttaatttagagtatgaaatagaaaaataaaatttagtttaattatagtattatgtatttagaattatgattaatttgaaattgagaatattttttttttttttttgtttaggtataattttttttttgtagttttggaaatgaggtaaggatgtatttgtatgatatagaggttttttttgtgaatatgtgaaagggttataaaagttcgaatagaattaattttagaggatttgggatttatagtttattttttgggtagtagaaaggtatgatttatatgtttttcgggattgaatattttattattagggtaggtgaaagaaagaaattaagagtgaaaaaagagttttaatattattagttaagaatgagataatagggtttatatggttttaggaattagtatgaagaaaaagttgtgttataagtagattttttttagtattttagataatttatattttattatatgttttattaattaaatttttaagatgtttattttttaattattagaatttatgaatatattatgttatgatttatatattatatgggtagtgtaggtaaaattaaggttatgaattttaagaataatttgttaagtataattcgtttagataaaatttaaaagtagagggttttttatgtttggagttggaaagttgaagtagaattataaattgaaaagattttatgtatgagagagatcgaattagttttgtttatagtggttatatggaaagtataagaaataatatagattttgttaaaaggagtaaagattagtttgttagtttataattagtatataaatggggattttagttttatagttataacgaattgtatttaattaatgatttgaataattttaaattgggtgtatttagagaataatgaaattggatttattagaaaggaataaatttttggtaatattttatgaaattagttgtattatgatagaattttgatttatagaaattgtgagataataaatttgttttgaattgttgagtttgtggtaatttttattgtagtaatagaaataattttagattttggtgtcgagaagtggagagttgtttatataaatatttaaaaacgtaaagtggttttgtatttggataggtgttagttgtaaaattttttataagaataaagagaaattttagtttttaggaaaatgaaaaaaaaaattatttttatagaatgaaaagtttagattttgttgagtggaaaaaagtttagatttttttaaataaattaataagtaaaaatatgaatgttaaaaataataggtcgggtatagtggtttatgtttgtaatcgtaatattttgggaggttgaggtgggaggatagtttgagtttaggaatttaagattagtttgagtagtatagtaaaattttatttttattttaaaaaattttttaggtatggtggtgtgtgtttgtagttttagttatttaggaggttgaggcgggtggattatttgagtttagaaggttgaggttgtagtgaggagttataattatgttattgttttttagttttggtgatatagtgagattttattttaaaaataaaaaaaaaaaattagtaataattttgttagtgagaatttagagggagaagggattaaggtagagaaattttatatggatttagagaatatttacgttatgtatgattgttagtagaaatttggagttttgtaatattgtttgtaagggtttaaaagtgagtttttatttgaaggaaagaagagttttgttatataaaaagatagattatttagtaaaattgtttttttgggttatgtggaaagtataatttgaagataaattatttagtaaaattgttttttttggttatgtggaaaaaataatttgtaaaaattaattttttagtttagaagattttagtaaagtgttggataagtggttttgtttttatttaatgtttagagtaaaatttagtgagaaaaatgaatagttggaatatttattaaataaaaagatagtaaaatatgataaaattagaagttttttgtttattttgggggcggggggggggtgggggtgaaaggggaggttaaattaaggagattttttgttagagtaaagttttatttgtatttatagttattttttattatcggtattattgtttgagttttcgttttttgttaggttagaagtaatattatatttttataggaatgtaaatcgtattgtaaattgtatacgtgagggatttaggttgtatgttttttataagaatttaatgtttgatgatttgttttttatttttagatgggatggtatagttttaggaaaataagtttagggtttttattgattttaaattatggtgaattgtataattgttttattatatattatatataataataatataaatgaagtgtataataaatgtaatgtattttatttatttagtaattatttttcgaattttattatttttaggtttttggaaaaattgttttttatgaaattagtttttggtatttaaaaaggtggggaacgttgatttagagagagagaaaaaaatagtatgtgatttttaattattttatgaatttttagaaaaaataaaagatttttttaggtattcgattattaaataagaaaagtaaaagttaaggaaaaaggaaagaaagggaaaagttaaggtgaaagaaaaagaaagaggaaagaaaaagaaaaggtaaggggtaaggaaaggtaaggtaaggtaaagtaaagtaaggtaaggtaaggtaaaaagaaaaaggaaaggaagtggagggaaaggaaagggaaagattaaaaggttagagaattaagttttttttaagtaagtaaaagtgtgatttatatatatttaatatttttaagaaatttaaggatattggattttaattattttagtagaagttaaaaatagatatgggataattttagaaaaaaaatatattagttttttgtttaatataataaatttttatgatatacgtaaaattttttttaaaagaagtattgttagtttaaacggaaagggatatagaattaatataatgaagatagttggattgatagaattttagaggtaggaagtaggaaataaaattatttagttgtaaatatttgttatttttgaaaaaaatggtaaggaagatttaaagggcggagttataggttaaaaaggattatttttaggttttgaaatttaatgggagtttgtttagttgtattttaaaatttttttagataaattttttttattttttatgttattttgtttgaattagaatattttaaattgttttattattgtattttgggaagtagataaagaggaattatgttttaggagttgtatttaatgattgatatttagagaataagtatttgatttaaatgatatttaggatttttgagttgattaattttaggtaagattttttttttttggattgggaattttaagagagggtggatgttattttatatttgttagagatatatttgagaatcggggtgaagatggtggtagggagaatggtttttttataaagatgtttataaattaatttttataaattttgaaaatatgttatttgatatggtaaaagaaattttttaggtataattaagattatgaatttaaaattgggtaattattttggattattttggtgtattaaatttaattatgtgagtttttaaattgaatagttttttggttagatttaagaagacggatgtgatagaggggaagattagaaagattaaaaatataagatggattttatttattgttgttttaggaaattattatgtaaagtatgagaagaaatgtgggtaggttttgaaagtaaaaaatggttttggatgatgaattgtagggaataatagtatttttattgtgtaataaaaagaaattaaatttggttaaaagtatggatatttttcgaagttaagagtttttagttttgtagatagtttattttatttatttatttatttatttatttatttatttatttatttattttttgagatattgttttgttttgttatttaggttggggtatagttgtgttattatagtttattatagtttttaatttttggtaaaataatttttttattttagtttttagagtagttagaattagagatatgtattattatgtttagttaattaaaaaaaaatttttttttttgtagatataggtttttattgggttgtttattatttacgatggtttttaatttttgattttaagtaatttttataattgagttttttaaagtaatgagattatagatgtgagttattatatttggttaatattttaattttaattttgtataattttatacgtagaatttaattgagttatatttttgatttatagaattttgagataaatttgttttgttttagattagtaaatttgttgaaatgtattaatagaaaaatagaaaattagtataaatagaaaatattttaaagggagaattagtaggttttagttgtataattggaaaaattggaataattgaagggtaatagtaagattttgatattgatggtttaattaataagattatgagttggttatgagattttgataggatttaagtatggatttaagtatttaaatatggattaatattagattttgtaattttggtaagtaatttaaaatttggtagatgggaagtgaaataatttaataaatagtaatatttattttattaaaaaatgagtttggtttttgtggttgtaatttaaatttatttttatttatggtttttaatttttattagttatagtttttaaattagggaataaagtatattaaatattaatttttatattatatattaaaatgttatgatatttatatttttgaaatgtttaaattattttttattaagttattaatgtaaaattaaagggaataaattgatttttagggatatatgggttgtaataagataggaaagggtaggtagattaaattagattgatagtgtttttgtttttttgttttttaaagattttgggttttgttatgttttttatattagtttagtattttagggtttaagtaatttttttttttttagtttattgagtgggtgggattataggtcgttatatttggtttgtttagattttttaaaaagtttaattattattttatataaaatttataatgtttaagtatttagtataataaatttttatttaagtgttaattggaatttgtattatttatgttaagtacgtaagtgttaattggtatttgtattatttatattaagataatagaatattttttatatattagatgatttttttttgttttttattagtaatttttatgatttttttttttttttttgtaaatagggtttttggttttgttatataggttaaattgtaagtggtatagtttattgtagttttaattttttaggtttaagtaatgtttattttttagtttaattatttgggattataagtatgtgttattaaatttggttaatttttaaagtatttttttgtatagataaggtttaattatgttgtttaggttggtgttaaagttttgagtttgagtaatttttttattttagttttataaagtattgggattataggaatgttattgtgtttggtatttatgattaatttttaattttaatatattttgtaggtttttgttgtaagattgtattatatttttatatttaatatagtttttagtttttttatagtaaattaataaaatggtaaaaaatttaaaatttttaataattataagtattttttagatttttgtgtagtttaaaagttttttttattttttttttttagagatagggttttattttgttatttagattggagtgtagtggtatgattatggtttattgtagtttttaatttttaggtttaagtaatttttttattttagttttttaagtagttaggattaatgatatatgttattatgtttagtttttttattgtatttttagtatatgttatggttatttatgtgtgttaatttttaaatattaaattatatgataaggtaatatgtaagtgagaaattaatggatttttaaagtgtttttttgaaatagatttatttaatttaaagaaagtgtgttttatgatatttaaattgttttaaataaaaaggttatgatgattatattaatattttgttaattatagaaaaagaaaaagggtatttgttttaaataagttgttattgttttttttatttaaataatttttggttttattaatttttttttttttaaaaaaatgtaattataaaattataaatgtaaattaattttttttgtataattaaagaaaattatatgaaattaaggtaatgaatgatggaataaatgtgatttgttggattattgaagtgattttttaatttttttaaaaatagtaattttattagttttaataaaagattaatttgtgggttaggtatggtggtttacgtttgtaattttaggattttaggaagttgaggtaggtggattataaggttaggagattaagattatttggtgttttgatagtatagatagtgaaattttgtttttattaaaaatataaaaaattagtcgggtattgtgacgggtatttgtagttttagttattcggaaggttgaggtaggagaatggtgtgaattcgggagacggagttcgtagtgggtcgagatcgtgttattgtattttagtttgggcgatagagcgagattttattttaaaaaaaaaaaaaaaaagattaatttgtagcgtaatttttttgttttaggtatttattttttttatttgtttgttagagtttgatagatgattagtttttttaattttgaaatttttttttatttttttgtttatatgatattttagttttttttttatttttttaatcgatggttattatagttttgtttaaggttttatatttagtttttttttttattatttttttatttatttttatagtttttaatgacgatttacgtgaagatgatttttaaaatttatacgttgagaaggatttaaaatttttattagatcgtttattgaatatttttaaaaattaaaatttagattttttttggtataattattatggtttttttttttttttttgatagttggttttttagattttgttaattttttttttataatttttttgttatgtttgttttgtttgtatttttattattattaattattttaagttttttattttttgatttttagaaatgaaaatagtttttgaaatggtttttgtaatatttttaaaataaatgattaggaaatttattataagaagggggttttgtaatgttaattaataaggtatttttataatttgtagttagatgaatttttttgaagtattgttttgattatttttttattaagaagtagtttttaatatttagtgatttttatattattaatttaagttattatatgatttatttattgttattatttaattttgtaatttagttggatagtatgttattttttaaacgatttttatgtttttattttggtatttaatattttagaattttttaggaggtgaggttttgaaaaagtggagttatatttagttaattgttattagtagggttaataattgttaatatttataaatatttataaatgtaggaaaatgttattattagtgatttagggatatagtgttagtgttttatgtatgtaattaaatatttgtgttatagatagttaaattttggtttaattattttgaaataggtaataaagagaaaagagtttaaataagtgagaaattaattacgaattgttatattttaggattttatttagtataatatttataaatttaaaattttgaatgaaagagggttaagtataattttacgttatatatatatttttattatgtatttgagtttatgataagggttgattattaatttaatttttattatagtgagtaattattttttaataatatatttgattgattattgttttattttattacggcgaaaattgatagaggtataagaggtttttttgtattttattgtaaagatgattatatttttacgttagtaagtttttttgggttataaatgttaatttttttttataattagaataaaattatgtttttaatggtaataatattaatataattttgataaggtgaaaaataagtttttatgattttatagtaattttttatgtttttgtagtaagaattaagtttagagattagttgaattggaagataaataagtagaatgatttagaggatttattttgaaaaataatttaggtttggtgtggtggtttaattttgtaattttagtattttgagggattacgggagggggattattggagtttaggagttttagataagtttaggtaaatagttggattttttttttataaaaaaaattaaaaattagttggacgtcgtggtgtatttgtggttttagttatttgggaagttgaggtaggaaggattattggagtttgagaggttacgtagttatgatagtgagttatgattatattattgtattttagtttgggtgatagagtaagataatgtttttataaaaaattgtaaaattagttagatgtggtggtgtatgtttttagttttagttatagtggtatgaagatgagaaaataattaatagttagtaaattaaaaaaggagaaataaagtaatgtaaagtagaaaattattttataaatatatatatgagtgtgtgtttgtgtgtgtatgtgtatatatatgggtttttttggtgttttttttttttgagatagggttttgttttgttatttaggatggagtgtagtggtgtgattatgatttattatcgtttcgattttttacgtttaagcgatttttttattttagtttttagagtagttgagattataggtatttattaatatgtttgggtaattttttttttttttttttttttttttttttttgtagatatgagggttttagtatattgattaagttggttttttatttttggttttaaggtaattgtttgtttttgtttttaaagtgttgggattataaatgtaagttattatagttagtaatattgttaaaataatttcgataaaggtttttgaaaatttattagtttttataagtaatgtaagagtgtttattttttaaaaattaataagtattatagattttaattttttggttaggttgggtgtcgtggtttattttagtaattttagtattttgggacgttaaggtaggtggaatgtttgaatttaggaatttaaatttagtttggttaatatggtgaaattttatttttataaataatataaaaattagttaattatgatagtgggtatttgtagttagttatttggggtttgaggagggagaattgtttgagtttaggaggttgaggttgtagtgagttataattttgttattgtattttagtttgggtaatagaattaaattgttttaaaaaaaggaaaaaaaaaatgtgattgtgtatggtggtttatatttgaaatagtaaaggtaagaggatcgtttgaggttaggagtttaatattagtttgggcgatagagtgaaattttttttttattaaaaaaaaaaaaattagttgggtgtggtggtatatttttgtagttttagttattaagaaggatgaggagagagaatggtttgagtttaggag

SEQ ID NO: 211 - DNA, 6012 bp, Artificial Sequence
  chemically treated genomic DNA (Homo sapiens)
attgaaaattataaagtattgataaaagaaaatagagaaataaagaattttatgtttatggattgaaaaatttaatattgttaagatgttaaaattgatttggtatgatggtttatatttgtaattttagtatttgggaggttgaggtaagaggattatttgagtttaggtgtttgagatttagtttgggtaatataataagatttggtatttattaaaaaaaaaaaaaaaagatgttaaaattgtttaaagtgatttgtatatttaatataatttttattaaaattttaagggttttttttttagtaaaagaaaaatttatcgtaagattcgtatggaattttaaatgttttaaatagtaaaaatagttttgaaaaaaaagaaaataattggaggaattttatttttttattttaaaatttgttataaagtatagttattaaaatagtgtgatattagtataaggttaattatatagattagtagaatagaatagaaagtttagaaagaaatgtatatgtttatggttagtttttttttttttttttttttgagatggagttttattttgtcgtttaggttggagtgtaggagtgtagtggcgcgattttggtttattgtaagtttcgttttttgggtttacgttatttttttgttttagtttttttagtagttgggattataggtatgcgttattatgtttagttaattttttttttttttttttttttgagacggagttttattttgtcgtttaggttggagtgtagtggtgtgattttagtttattgtaagttttgttttttaggtttatattatttttttgttttagtttttcgagtagttgggattataggcgttcgttattacgtttggttaattttttgtatttttagtagagatggggttttattatggtagttaggatggtttcgattttttgatttcgtgattcgtttatttcggttttttaaagtgttgggattataggtatgagttatcgtgttcggttagttaattgatttttaataaggatgttaaagttaatagagtggaaatgatagttttttcgataaatggttttgggaaaattggaaggttataggtaaaagaatgaagttagtttattattttatattatatataaaaatttaaagtaggttaaagatttaaattaatgagtttaaattattagttttttagaagtaaatataggtgaaaatttttatgattttgaattaggtacgtgatgttttaaatttgatattaaaagtaggtaaaaagagaaaaaatagttatattggatattattaaaattaaaaattgttgtatattaaaggtattttttttatagaatgagagaaaatgtttgtaatttatatatttgatgagggattaatatttagaagatatagtaaatttttgtaatttaataataaaataaataaataatttattttaaaaatgggtaaataatttgaatagttattttttaaagaagatatataaatggttaataaatatataaaaagatgtttaatattattagttattagggaaatgtaaaatattattatttacgttttttagaatggattttattttttatttttatttttatttttgagatagagttttgttttgttatttaggttggagtgtagtggtataattttggtttattgtaagtttcgtttttcgggtttatattatttttttgttttagtttttcgagtagttgggattataggcgttcgttattacgtatggttaagtttttgtatttttagtagagatagggttttattgtgttagttaggatggtttcgattttttgatttcgtgatttatttatttcggttttttaaagtgttgggattataggtatgagttattacgttcggtttagaatggttattttggttttttttttttttttttttttttttttttttttttttgagataaagtttcgttttgtcgtttaggttggagtgtagtggtgtgatttcggtttattgtaaattttgttttttaggtttacgttatttttttgttttagttttttgagtagttgggattataggcgtttgttattatggtcggttaattttttgtatttttagtagaaacggggttttattgtgttagttaggatggttttaattttttgaatttatgattttttcgttttggttttttaaattgttgggattataggcgtgagttattgtgttggtttttttttttttttttttgagataaagttttgttttgttatttaggttggagggtagtggcgtaatttcggattattgtaatttttattttttaagtttaagtaatttttttgttttagtttttttagtagttgggattatagatgtttattattaaatttggttaatttttgtatttttagtagagatggggttttgttatgtgggtcgggttggttacgaatttttgattttaggtgatttgtttttttcggttttttaaagtgttgggattataggtgtgagttatcgtgtttagttagaatggttatttttttaaaaagaaaaataatagatattggtgaggatgaaggaaattgaaatttttatatattgttggtgggaaggtaagatggtgtagttgttatatgtttattttgtgttgttataatagaatattatagtttaggtaatttgtaataagttgaaatttattggtttataattttgaaggttgggaagtttaagattgaggggttagtatttggtaagaatttttttgttgtgttattattttatggtggaaagtagaaatgttatagaggtggaaagcggaaatgttatagagggtgaaagagagagtaagggagggttgaatttgtttttttatatggtatgtatttttacgataattaatttatttttgtgataattatattaattttttaatgagggtataatttttatgatttaaatatttttattaggttttattttttaatatgacgattatattgggaattaaatttttagtatttgaaatttgaggatatatttaaattatagtaatgggtgtagagtttttgttttagtcgattttttttttttttttttttgagatggagttttgttttgttatttaggttggagtgtaatggcgcgatattagtttattgtaatttttgttttttcggtttaagcgatttttttgttttagtttttcgcgtagttgggattatatgtatgagttattatgtttcgttaattttttgtatttttaatagagatggggttttattatgttggttaggttggtttcgaatttttgatttatgatttgtttatttcggttttttaaagtgttgggattataggtatgagttatcgtgtttggttttgttttagttgatttaaaagttttggaagtcgagcgttttagttttagtattttgggaggttaaggtaagtgaattgtttgaggttagaagtttaagattagtttggttaacgtggtgaaattttgtttttattaaaaattaaaaaaaaattagttgggtgtggtggcgtgaatttgtagttttagttagttgggagattgaggtgggaggattatttgagtttggtaggtataggttatagtgagttgagattgtattattgtattttagtttggagttttggaaataaatagtggtgatgtttatataatattgtgaatgttttgaatatttttaattgtatatttaaatagagtaaaaatgggttaggtatggtggtttatgtttgtaattttaatattttgtaaggttgaggtgggaggattatttgaggttaggagttttagattagtttaggtaatatagtaagattttgtttttataaaaaattaaaaaattagtcggatgtgtggtgatatatgtttgtagttttagttatttaggaggttgaggcgggaggattgtttgaggttaagagtttaaggttgtagtgagttatgattatattattgtagtttagtttgggtgatatagcgagattttgtttttaaataaatagtagaaatggaaattttatgttaagtgtattttattattattattattattataataaagtaaagttaaggtttaaggaagttttttttagtagagagttgagatggagaaaagggttttgaattatagttgtttgttgaaggaagttgtttaaaggttagtgaagttttttttgagggtgtttgggttgtgtattaggagtgaaggttgagggttattttaggtgtgagaaggagtaattgggagagtggcgttgatgttttttttcgggttaggaggtatttggattatagagcgatgtttgtttatttttgtttgtaagggagtagatttttcgatattcgatgggtttttatttcgtttcggtagttgttcgtgttaggagcgttgggtttgtttttttttacgggagttattatagaggtttcgggtagtttgtatagataattgtttggtaggtgattaggaggggatgtatgagtagatgtaggtagtatttgtagtttttttagttgtgtttttagtatttgttgtttaggaggtagaagttttgttttcggttttgtaggtgattttagtgtttttgaattcggttttatatgtgtaggaggggagtgattgtatttgaagatgggagtttggttgggggtttgggaagtttttattattttttaagagtttattgattagtttagtttatattaggtgggttttggtattggaggttacggtttaattttgtagttttttttgggtagtatttttagggattcgtaggttagtatggttattaaggataggtggtgagagtagttttttattgttttggtgattttaatggtttattttttggtgtttttgtggtgagtttttgttatattaagcgagtgaaattatcgaggattaatagttttggaaatatacggagaataaatataggatgagtgggttttgtgagggttgttttttgtgatttagtaaggaaagtttagaggggaaggtaaaattgtttttttttagggaagttagaagtttgagaatttaaaagggaaggagaatttaatgtattttaaaaatgtaatttttatgaattagtaatagttttataaagaaagagttttttgagtttttagaatttgttttgatttatttgtgtttttataaattttattttatttttatgagttattttgcgaatagttttaaaggtgtattagaatgataatagaaattagaagagttattagggtattaagtattaggagatttggggttatatatttttagcgggtagtgtttattgtttaggatgttttagatattataatttttcggaaatgatttaggtaattggagtttttttttttaagataaggtattttagggaataacgttttatatttgtggcgtttgcgttatgtatttattgtatttatagattgttttaggtatttagagagtaaaatatattaattttgcgttgttgtattaatatgtttttgtttgttttattggagatgaaattttattgtaggtgtttttaaagttttcgtatgatttattatttaacgaagtaatagtagttagatttattataaagatagatatgagaaaaggtaagtgtatgttattaatataataagtgtatatatttttataggtttatgtgttgttttaaatgtgttatattattatattagtagtttttaaattaattattggtggggtaaagttaaattgagatatgaaggaaataattgtttgaaattttttttataattttttatttattatggaatttgtgttttaaagtgtgaatatttttgtattttggggtgatttttgatgtgtagtgttaggtaggttttgttattttggaggtatttagaggatagaaatttgatttgtaagtggggttttttattttcgataataggagtttttagtagtattttaat

SEQ ID NO: 212 - DNA, 6012 bp, Artificial Sequence
  chemically treated genomic DNA (Homo sapiens)
gttaggatgttgttgggggtttttgttgtcgggagtggggaattttatttgtagattaggtttttgttttttgaatgtttttagggtggtagaatttgtttaatattgtatattaaggattattttaaaatatagggatatttatattttggagtatagattttatagtgagtggaaggttatagagaggattttagatagttgttttttttatattttaatttggttttgttttattagtagttggtttaaagattgttagtatgatagtatagtatatttaagataatatataggtttatagaaatgtgtgtatttattatgttaatgatatatatttgtttttttttatgtttgtttttgtaatggatttgattgttgttgtttcgttaaatgatgggttatacggaaattttggaaatatttgtagtagaattttatttttagtggagtaaataaaggtatgttaatatagtaacgtaggattgatatattttgttttttaagtatttaaagtagtttatgaatatagtgaatatatgacgtaaacgttatagatatgggacgttattttttaaaatgttttgttttgggaaggaaaattttaattatttaaattattttcggaaaattgtgatgtttgagatattttgggtagtaaatattgttcgttaaagatatatggttttagattttttgatatttagtgttttaataatttttttggtttttgttgttattttgatgtatttttgaggttgttcgtaagatgatttataaaaatagggtaaagtttgtgagggtatagatgaattagaatagattttaaaagtttagaaagttttttttttataaaattgttgttaatttatgagggttatatttttgaaatatattaagtttttttttttttttaagtttttaggtttttggtttttttgggaagaagtagttttatttttttttttaggttttttttgttaagttatagaaaatagtttttataaagtttatttattttatatttatttttcgtgtatttttagggttgttggttttcggtggttttattcgtttgatgtaataggagtttattatagagatattagaaaatgaattattggggttattaggataatgaggagttgtttttattatttgtttttgatgattatgttgatttacgagtttttggaaatgttgtttagagggaattgtagagttgagtcgtggtttttaatgttaaggtttatttggtgtgagttgggttggttagtggatttttgaggggtgatgggagttttttaaatttttaattagatttttatttttagatgtaattattttttttttatatatatggggtcgaatttagagatattggggttatttgtaaggtcgagaataaggtttttgttttttagatagtaggtgttgagggtatagttagggggattgtaagtgttatttgtatttgtttatgtatttttttttggttatttgttaggtagttgtttatgtagattgttcgaggtttttgtgatggttttcgtggggaggagtaagtttagcgtttttgatacggatagttgtcggaacggaatagaggtttatcgggtgtcgagagatttgtttttttgtaagtaggaatgaataggtatcgttttgtgatttaaatgttttttaattcggggggaagtattagcgttatttttttagttgtttttttttatatttaaggtgatttttaatttttatttttgatgtatagtttaggtatttttaggagagattttattggtttttggatagttttttttagtagatagttgtggtttagaatttttttttttattttagttttttgttaaagaggatttttttgggttttggttttgttttgttgtggtggtggtggtggtggtaaaatatatttaatataaaatttttatttttgttatttatttagagataaagtttcgttgtgttatttaagttgaattgtagtggtgtaattatagtttattgtagttttaaatttttggttttaagtaattttttcgttttagttttttgagtagttgagattataggtatgtgttattatatattcggttaattttttaattttttatagaaatagggttttgttatgttgtttaggttggtttggaatttttggttttaagtgatttttttattttagttttgtaaagtgttgaaattataggtatgagttattatgtttggtttatttttattttatttaagtgtataattaagggtatttaaaatatttatagtgttgtgtaaatattattattgtttatttttagaattttaggttggagtgtagtggtgtagttttagtttattgtaatttgtgtttgttaggtttaaatgatttttttattttagttttttaattagttgggattataggtttacgttattatatttagttaatttttttttaatttttagtagagatagggttttattacgttggttaggttggttttgaatttttgattttaagtaatttatttgttttggttttttaaagtgttgggattgaggcgttcggtttttagaatttttaaattaattgaaatagggttaggtacggtggtttatgtttgtaattttaatattttgggaggtcgaggtgggtagattatgagttaggagttcgagattagtttggttaatatggtgaaattttatttttattaaagatataaaaaattagcggggtatggtagtttatgtatgtaattttagttacgcgggaggttgaggtaagagaatcgtttgaatcggggaggtaggggttgtagtgagttgatatcgcgttattgtattttagtttgggtgatagggtaagattttattttagaaaaaagaaaaaaaaaaatcgattgaaatagaaattttatatttattgttatgatttaaatgtgtttttaaattttaggtgttggaaatttgatttttaatgtggtcgttatgttaggaggtagggtttaatggaggtgtttgggttatggaaattgtgtttttattaagaggttaatatggttattataggaatgggttagttatcgtaagagtgtatattatgtaaaaggataagtttagtttttttttgtttttttttttattttttatggtattttcgttttttatttttatggtatttttgttttttattatgggatgatgatatagtaagaaggtttttgttagatgttggttttttagttttggattttttagtttttagaattgtgagttaataaattttaatttattataaattatttaggttgtggtattttgttataatagtataaaatggatatgtagtagttgtattattttatttttttattagtaatgtatgagggttttaattttttttatttttattaatatttgttatttttttttttaaaaaaatagttattttggttgggtacggtggtttatatttgtaattttagtattttgggaggtcgaggagggtagattatttgaggttaggagttcgtgattagttcggtttatatggtaaaattttatttttattaaaaatgtaaaaattagttaggtttggtggtaggtatttataattttagttattagggaggttgaggtaggagaattgtttgaatttgggaggtggaggttgtagtgattcgagattgcgttattgttttttagtttgggtgatagagtaagattttgttttaaaaaaagaaaaaaaaaggttagtatagtggtttacgtttgtaattttagtaatttgggaggttaaagcgggaagattatgagtttaggagattgagattattttggttaatatagtgaaatttcgtttttattaaaaatataaaaaattagtcggttatggtggtaggcgtttgtagttttagttatttaggaggttaaggtaggagaatggcgtgaatttgggaggtagagtttgtagtgagtcgagattatattattgtattttagtttgggcgatagagcgagattttgttttaaaaaaaaaaaaaagaaagaaagaaagaaagaaaaaaattaaaatagttattttaggtcgggcgtggtggtttatgtttgtaattttaatattttgggaggtcgaggtggatggattacgaggttaggagatcgagattattttggttaatatagtgaaattttgtttttattaaaaatataaaaatttagttatgcgtggtggcgggcgtttgtagttttagttattcgggaggttgaggtaggagaatggtgtgaattcgggaggcgaagtttgtagtgagttaagattgtgttattatattttagtttgggtgatagaataagattttgttttaaaaataaaaataaaaataaaaaataaaatttattttaagaagcgtgaatagtgatattttgtatttttttaatgattaatgatgttgagtatttttttatgtgtttattggttatttgtatattttttttggaaaatagttatttaagttatttgtttatttttggagtgggttgtttgtttgttttgttgttaagttataggagtttgttgtgttttttggatattgattttttattagatatgtgaattgtaaatatttttttttattttgtgggagaaatgtttttgatatataatagtttttaattttgatgatgtttaatgtagttattttttttttttttgtttgtttttggtgttagatttaaaatattacgtgtttaatttaaggttatgaagatttttatttatgtttatttttaagagattaatagtttaagtttattaatttagatttttgatttattttgaatttttgtatatggtataaggtaatgagttagttttatttttttgtttgtgattttttagtttttttaggattatttgtcgaagagattgttatttttattttgttggttttgatatttttgttgaaaattaattgattggtcgggtacggtggtttatgtttgtaattttagtattttgggaggtcgaggtgggcggattacgaggttaggggatcgaaattattttggttattatggtgaaattttatttttattaaaaatataaaaaattagttaggcgtggtggcgggcgtttgtagttttagttattcgggaggttgaggtaggagaatggtgtgaatttgggaggtagagtttgtagtgagttgagattatattattgtattttagtttgggcgatagagtgagatttcgttttaaaaaaaaaaaaaaaaaaaaaattagttgggtatggtggcgtatatttgtaattttagttattagggaggttgaggtaggagaatggcgtgaatttaggaggcggagtttgtagtgagttaagatcgcgttattgtatttttgtattttagtttgggcgatagagtgagattttattttaaaaaaaaaagaaaagaaaaattgattatagatatatgtatttttttttgaattttttattttattttattggtttatgtgattagttttatattagtattatattgttttgataattgtgttttgtagtaagttttgaaatgagaaagtgaaatttttttaattgttttttttttttttaggattatttttgttgtttgaagtatttgaaattttatacgaattttacggtagattttttttttgttgggaaaaaagtttttgagattttgatagggattatattgaatgtgtagattattttgggtaattttgatattttttttttttttttttaatagatattaggttttattgtgttgtttaggttggattttaaatatttgggtttaagtgatttttttgttttagttttttaagtgttaagattataggtgtgagttattatgttaggttaattttgatattttaataatattaagttttttagtttatgaatatgagattttttgtttttttatttttttttattagtgttttgtagtttttagt

SEQ ID NO: 213 - DNA, 6631 bp, Artificial Sequence
  chemically treated genomic DNA (Homo sapiens)
atatttaaaggagataaaagaattataagatgattacgaaataatattttatttaaatttagatatagaaatttttagaaatatttaaaaaaagaatataaaaaggtataaggatgattatatattatgattaagtagggtatttttataatgtaatgtttatttaatatgatataatattatttgaataaagtaaaaatgtaatatttgaaatagaaaaagtttggtaaatttaatatttatgaatgatagaatattaagaaaattattagaagaaaatttttgagatttgttaaaagttttttatgaaaaattaaaattggttcggcgtagtggtttatatttgtaatttagaattttgggaggttgaggtggaaagattgtataaagttaggagtttaagattattttggataatatagggaatttttatttttataaaatattaaaaaaaaaattatttgggtatggtggtgtatgtttattgttttaattatttaggtagttaaggtgggaggattatttgagtttaagaggttgaggttgtagtgagttaagatgaaaaattttatattaaaagttaatatatttaatggtgaatgattaggggttttatttgtaagtttgaaaataggacgagaatttttatttatattattatttattattgtattggaggtatgagttagaaaattatattagaaaaattaatataatttttagattagaaaagaagtggaatagttttttattgttataatgttgtattttaaaagtataagaaatttattaaaaatttatttgaggttgggtatggtgatttacgtttgtaattttagtattttgggaggtcgaggcgggtagataataaggttaggagatcgagattattttggttaatatggtgaaattttgtttttattaaaaatataaaaaattagtcgggtatagtggtaggcgtttgtagttttagttattcgggaggttgaggtaggagaatggcgtgaatttaggaggtagagtttgtagtgagtcgagattcggttattgtattttagtttgggtgatagagtgagattttgttttaaaaaaaaataataataaaataaaataaaataaagtaataaataaataaaaatttatttgagttaatatagaagtttattaatgttataagattaatatataaggttagatagtatttttatattataggaataaataaaataagaattaaattaaaattttattaatagtattttagaaaaaaaaattagaaatgaatttaataaaataattgtatatattatatattgaaaattatttaaaatgttgaaagaaattaaagagttgaataaattgagatatatttaatatttaaatatagtaatattgaatatgaagattaaaatatttaataaatttatttatagatttaatgtaaattttaatgtagtttttttttaatataaattgataagttttttttaaaatttatataaatatataaagaaaattaaatatataagaattttgaaaaataataaaatttagtaatttatatttttgatataaatttttattataatgttatagtaattaaataatatagtattggtataaggatagatttatgtagattaaaaaaaaaaaaaaaaaattatagaattaaagttttattaatgaataaattaatttgtggtaaaattattttttttttgtgaaaggtgttgtgatagttattatatttataattttttagtttaatatgaattttggttttgagtaagatatgagtaggtattaaaggttttgttatattttttatatttgtaggattttttttaggtatgaatttttttaggtatattgaggtttgagtagtggttaaaggttttgttatattttttagatttgtagtattttttttttgtatgaatttttttatggtttgaaaggtttgaataagatataaagattttattatattttttatatttatagggtttttttttagtatgaatttttttatgtttagtaaggtgtgagtatcggttaaaagttttgttatattttttatatttgtagggtttttttttagtatgaatttttttatgtttagtgaggtttgaatattggttaaaagttttgttatatttattatatttgtagggtttttttttagtatgaatttttttatgtagagttaggtatgagaattagttaaaggttttgttatattttttatatttatggggtttttgtttagtgtgaatttttttatgtttggtatggtttgaattgtggttaaaagttttgttatattttttatatttatagagtttttttttagtatgaattataatgtgattagaaaggtttgtgaaggatttaaagatttttttatattttttatatttgtaatgtttttttttattatgaattgttttatgtttaagaaagtatgagtagtgtttaaaggtttttttatattgtttatatttgtaggatttttttgtagtgtggattttttgaagtggagttagaattgaggatatgtaaaaggaattgttatattttttatagttggaagatatttttttagtatgttttattttatgtttatttagatttgacgatttattaaagatttttatatatttattaaattgaaagattttggtatgtgtagttgataaagattggttaagtttattataatattttttttgtattttagatttatttatatttttttaatttttttttaattgtaaatttttaatgttatagtttttatatttttttagtattattttttgaaatgaattttttatattatgttttggtaagaggttttgggtgaaatgagaagaaatagttgaaaaaaattaaaataatatattatttaatttattggatttagatgaatataatttaaaaagttaatatatgaaattatattaaatatattagcgagatagtataataaaatattataggttttgattttttgatgaatataatataataaaaatatattgaataaaatgtttttgtgagaattttagaaattatataaaagttatagataaggggaaggaaagtttgttatatttatttattataattttttttttttttaaatatagtataatgattttaggaataaatttttaatttttagttttttttttaatagagatagtagtggtatatatgtttatatttttgatggaatttttaaagattagtttttgttttttatgatataaagtgttgaaaggaatagtggtagaatagaattaatttttaatttaaaggttggttttgttgagattaaaggtaaataattgttatagtagtagagaggttgtagtattatagatagataatagatttagtaaataattgattagagaagaagaaagaaagaagaaataagggtaaatttttttaattggaaattaaatataaaattttagagaatatatattttgagaataggtttgagaggtttatggaaattttagtttaagttatttggtattagattatttaggataaagttattttataaagattttgatagatggtttttagtgtttaaattttaattaaagattgtaatatatatattagggtaatatggtttaattaaaaaaaaaataaataaataaataaataaataaataaataaataaataaatatttagaaattaattttaaagaaatggagatgtataagttatttgaaaaatttgagataattatttgaataatgtttaatgagtaaaataggaaaatagatatgaaattaagaaaatgagaaattttgataaatttttaaatgtaaaaaaaaaaaattaagaagtttaatatattttaaataggataaatataaatagatatataataagatatattataagtagttttaaaaaattatagatgagaagagaattttaaaaatagaaagggaaaagtaatgtgttatttataagtatgtttttatgagattattagagtatagttgttttatatattattattttagtattatagaattttatttttgtgtatgtgattacggggtatatagagaaaataggaaatttgttttatttgaagaaataaatttttagaaattgatttttaaaaaagggagatttttgtatttttttgataaagaatttaaagtaattattttaaatatgtttaatgattaaaagtagaatatatatagataattttataaaattaggttgggtatggtgataagagtattatggtttatataaagtaaaatattttttttgttgtttatttaaaaataaattttggttatgtatagaagtttatatttggaattttagtattttggaaggttgaggtgggagaattgtttgagatcgagtttaagattagtttgagtaatacggtgagattgtttttataatttttttttttaaattagttaggtatggtggtatatgtttatagttttagttatttagaaggttgaggtggaaggattatttgagttgaggagtttgaagttatagtgagttatgattatatcgttatatattattagtttggatggttttgttttgtttgagatggagttttttttggtattagattggagtgtagtggtgtagttttggtttattgtaattttcgtttttcgggtttaagtgatttttcggatttagttttttaagtagttgggattataggaatatgttattatatttagttaatttttgtatttttagtagagatagtattttattatgttggttaggttggttttgaatttttgattttaagtgatttgtttattttggttttttaaagtgttgggattataggcgtgagttattatgttcgattattttttttttttttttaataatcggattttttaggaattaatagagcgagaagttatttattattataatagtgttatttatgtggaatttgtttttatgatttaagtattttatattaggttatatttttaatatgaggattaaattttagtatgaaatttgaagggagaaaatatttaaattgtatttaatattaagaaattgtatatgagaatattattgtattgttaatagttataggggagggagttatgttgtagattaattaatttatttatgtttaatttgtttatgttagaaaatttgtattttttttgatattggtagtagtgtaagtttagatttagtaataaaagaaaataattaataaattattaatgatggggttgttattttttgtagaagttatatgatagatatattgtgtaaaattaaataagttagtgtagaaaaatttttagatgttaaattttaatttgaataaaaaaatttttgttagagtaaaattatatgaatgtattgtgtgtgaaaaattttttatacgttatttatttttttataggtatattatattttattttggaaataatttatatgggtgtgaggaatgcggaaagaagttatgtatatgtaaataatgttagaaaatttttttttttgttataagggtttatagagatatagtaatgtatattggaaatggatattatggttgtataatatgtgagaaagtttttaatatttttagtttattttagatatattagagaaattatattggagagaaattttatgaatgtatggaatgtgggaaagttttagtttttttcgtttttttaatagatataaaaggatttatattgttttatattttagtttataatttatgttgagtttattttgtgattgttgtaaggtgttttttttatttttttgcgtatggatgtttaggtgtttaatatttgttttagagattagattttttttgttgaattttttttggttttttgtgaaagtttagttgattatatttgttagggtttatttttgggttttttgtttttttttgtttattttttttttttttttaaatattgtattgttttgattattatagttttatattaagttttagtgttaggtggtattaattttgtgaattgattttttaatattgtattattatttgggttttttggttttttatataggtgttagaataaattttttttttttaaaataatatgatttgttaggatttttattgtaattgtattgaatttgttatttaaattggggagaattgatattttagtaatattgaggttgtttatttatggacgtggaatatttttttatttatttagatttttttttttattattagaaatgtatagttttgtatagttttgttatataggtttttttttttattgggtgttatataagtgttgttgtgtttttaaatttaaattagttgtttattgttaatatatagaaaaataattggtttttgtatattaattttatattgtattattttgttataattttattagtttagggagatttttgttggtttttttggattttgtatatagatagttatgttatcgataaataattattaatttgtagaaaggtagttttatttatttttttttaattttagtggttttatttgttttgttttattttttaattttttggttttttagtaattattgata

SEQ ID NO: 214 - DNA, 6631 bp, Artificial Sequence
  chemically treated genomic DNA (Homo sapiens)
tattaatagttgttgaaaaattagaaggttaagaaatagggtagagtagatgaagttattgaaattgagaaaggataaataaaattgtttttttgtagattaatagttatttgtcgataatatgattgtttatgtataaaatttaaaagaattaataaaaatttttttgagttaatgagattatagtaaagtggtataatgtaaggttaatatataaaagttaattatttttttgtatattagtaatgagtaattgatttaaatttaaaaatataatagtatttatatagtatttagtaaaaagaaagatttatatgataaaattatgtaaaattatatatttttaatgatagaaaaaaagatttgaataaatggagagatattttacgtttatgaataggtagttttaatattgttaagatgttagttttttttaatttgaataataaatttagtataattataataaaaattttaataagttatgttattttaaaaaaagaaaatttattttaatatttatatgaaaagttaaaagatttagatggtaatataatattgaagaattaatttatagaattgatattatttgatattaagatttaatgtaaagttatagtaattaagatagtgtaatatttgggaaagaaaagaagataaataaaagagggtagaaaatttagaaataaattttgataaatataattagttgaatttttataaaagattaaaggaaatttaatagaaaaggtttggtttttaaagtaaatgttgaatatttggatatttatacgtaaggaaataaaaaagatattttgtaatagttatagaataaatttaatatagattataaattgaaatgtgaaatagtgtgaatttttttatgtttattaagagaacgggaaaaattaaggtttttttatattttatatatttatagggtttttttttagtgtgatttttttgatgtatttgaaatgaattgggaatattaaaaatttttttatatattgtataattataatgtttatttttagtgtgtattattgtgtttttgtgaatttttgtgatagaaagggaagttttttgatattgtttatatgtatatggttttttttcgtattttttatatttatatgggttgtttttagaatgagatatgatgtgtttatgaagggatgaatgacgtatgaagaattttttatatataatgtatttatgtggttttattttagtaggaatttttttgtttagattaaaatttggtatttggaggtttttttatattgatttatttaattttatatagtatgtttattatatgatttttgtaaaaaatgataattttattattaatggtttattagttatttttttttattattaagtttgaatttatattgttattaatattagagaaagtgtaggttttttaatataaataaattgaatataaatggattgattagtttataatatggtttttttttttatagttattaataatatagtaatatttttatatgtagttttttagtattgaatatagtttgggtattttttttttttaaattttatgttgaaatttgatttttatgttggaggtatgatttggtgtgaggtgtttgggttatgggagtagattttatataagtggtattgttgtggtaatgagtgatttttcgttttattagtttttgaaagattcgattgttaaaaaaaaaaaaaaaatggtcgggtatggtggtttacgtttgtaattttagtattttgggaggttaaggtgggtagattatttgaggttaggaatttaagattagtttggttaatatggtgaaatgttgtttttattaaaaatataaaaattagttgggtgtggtggtatgtttttgtaattttagttatttgggagattgagttcggagaattatttgaattcgggaggcggaggttgtagtgagttaagattgtattattgtattttagtttggtattagagaggattttattttaaataaaataaaattatttaggttggtggtgtgtagcggtatgattatagtttattgtagttttaaattttttagtttaagtgatttttttattttagttttttaagtagttgggattataggtatatattattatgtttggttaatttaaaaaaaaaaattgtagagatagttttatcgtgttatttaagttggttttgaattcggttttaagtagtttttttattttagttttttaaaatgttggaattttaggtgtgagtttttgtatatagttaggatttatttttaaatgaataataaggagagtattttattttatgtaaattataatgtttttgttattatgtttaatttgattttgtagagttatttatatgtgttttatttttggttattgaatatgtttaagatgattattttaaattttttgttaaaaaaatgtaaaaattttttttttttaagggttagtttttggagatttgtttttttaagtagggtaggttttttattttttttgtgtgtttcgtgattatatatataaaaataaaattttatagtattagaatgatggtatatgaaataattatgttttggtaattttatagaagtatgtttatagatgatatattgtttttttttttttgtttttgagattttttttttatttgtaattttttgaaattgtttataatgtattttgttatgtgtttgtttgtgtttattttatttgaaatgtgttgagttttttaattttttttttttatatttgagaatttgttagggttttttatttttttaattttatgtttgtttttttgttttatttattgggtattatttaaatggttattttagattttttaggtaatttatatatttttatttttttagggttgatttttggatatttatttatttatttatttatttatttatttatttatttattttttttttgattgagttatgttattttaatgtatatgttgtaatttttggttgagatttgggtattaaaagttatttgttaaaatttttataaaatggttttgttttggataatttgatattaagtgatttgggttagggtttttatgagttttttaaatttatttttaggatgtatgttttttggaattttgtgtttaatttttagttaaagaggtttatttttgttttttttttttttttttttttttaattaattatttgttaaatttgttgtttgtttgtagtattgtagtttttttgttgttataataattatttatttttggttttagtagaattaatttttgaattaaaggttggttttattttattattattttttttagtattttgtgttatgggagatagaaattagtttttggaaattttattaaaagtatgggtatatgtgttattattgtttttattgaaggagaagttaggagttgggagtttatttttgaagttattatgttgtgtttaggagaagaaagagttgtggtgggtaaatgtaataagttttttttttttttgtttatggtttttatatggtttttagagtttttataaaggtattttgtttagtatatttttgttatattatgtttattaaaaaattagggtttgtagtattttattatgttatttcgttaatgtgtttggtataattttatatattagttttttaaattatatttatttaagtttagtaagttggataatatgttattttaattttttttagttgtttttttttattttatttaagattttttgttagagtatggtataaaagatttattttaaaaagtgatattgagaagatatggaagttatggtattgagaatttataattaaagaaagattgggaaagtgtgggtgaatttaaggtgtagaaagaatgttgtaatggatttaattaatttttattaattatatatattaaaattttttaatttaataaatgtgtgaaagtttttagtaaatcgttaaatttaaatagatataagataagatatattggagagatattttttaattgtaaagaatgtgataattttttttatatatttttagttttaattttattttagagaatttatattgtagagaaattttataagtgtaaataatgtgggaaagtttttaggtattgtttatgtttttttgaatatgagataatttataatgaagagaaatattataaatgtaaagaatgtggaaaagtttttaaattttttataagtttttttaattatattataatttatattggaaagaaattttataaatgtgaagaatgtggtaaagtttttaattatagtttaaattatgttaaatataagaaaatttatattggatagaaattttataaatgtgaagaatgtggtaaagtttttaattggtttttatatttaattttatataaaagaatttatattggagagaaattttataaatgtgatgaatgtggtaaagtttttaattagtgtttaaattttattaaatataagagaatttatattggagagaaattttataaatgtgaagaatgtggtaaagtttttaatcggtgtttatattttattgaatataaaagaatttatattggagagaagttttataaatgtgaagaatgtggtaaagtttttatattttgtttaagttttttaaattataagagaatttatataagagagaaatgttataaatttgaagaatgtggtaaaatttttaattattgtttagattttaatgtatttgagaaaatttatatttgagaaaaattttataaatgtaaaaaatgtggtaaagtttttaatatttgtttatgttttatttaggattagagtttatattgaattaaagaattataaatataatgattgttataatattttttatagaaaaaaaataattttattatagattaatttgtttattaatggaattttaattttgtggttttttttttttttttttggtttatataaatttgtttttatgttagtattatattgtttaattattgtaatattgtagtaagaatttatattaggagtgtaagttattgaattttgttattttttagaatttttgtgtgtttgattttttttatatgtttatatggattttaggaagagtttgttaatttatattaaagaaaagttatattggaatttgtattgaatttgtagataaatttgttgggtattttgatttttatatttagtattgttatatttgaatattgagtatattttagtttatttagttttttgattttttttagtattttaaataatttttagtgtatagtatgtgtagttattttgttaagtttatttttaatttttttttttaggatattattaatgaaattttaatttaatttttattttgtttatttttataatataaaagtattatttaattttgtatgttgattttgtggtattgatgaatttttatattagtttaagtaggtttttatttatttattattttattttattttattttattattatttttttttgagatagagttttattttgttatttaggttggagtgtagtggtcggatttcggtttattataagttttgttttttgggtttacgttatttttttgttttaatttttcgagtagttgggattataggcgtttgttattgtgttcggttaattttttgtatttttagtagagatagggttttattatattagttaggatggtttcgattttttgattttgttatttgttcgtttcgattttttaaagtgttgggattataggcgtgagttattatgtttagttttaagtaggtttttaatgaattttttatatttttaaaatataatattatggtaataaaagattattttattttttttttaatttggagattgtattgatttttttagtgtaattttttggtttatatttttagtataatggtgaatagtggtataagtagaaattttcgttttgtttttaaatttgtagataaagtttttagttatttattattaagtatattagtttttggtgtggagttttttattttggtttattgtagttttaattttttaagtttaagtgatttttttattttaattgtttgagtagttgggataataggtatgtattattatgtttagataattttttttttaatattttgtaaagatggggattttttatattgtttagaatggttttgaatttttggttttatgtagtttttttattttagttttttaaagttttgggttataggtgtgagttattgcgtcgggttaattttggttttttatggaggatttttagtaggttttaaaagtttttttttaatagtttttttggtgttttattatttataggtgttgaatttattaaattttttttattttaagtattatatttttattttgtttaagtaatattgtattatattaaatgaatattgtattgtgaaaatattttgtttagttatggtatgtaattatttttatatttttttgtattttttttttaaatatttttgagaatttttgtgtttaaatttaaataggatgttgtttcgtaattattttgtgatttttttgttttttttgggtat

SEQ ID NO: 215 - DNA, 8260 bp, Artificial Sequence
  chemically treated genomic DNA (Homo sapiens)
ttcgtgtttttttcgtttttgtttttatgggtttagggagtttttaagatttcgtttttcgtttgataacgcggtttttttagaagtagataaaatcgagaaatgttaaagtgatggttcgaggacgacgacggaagtttcgttgttaggttgtgattggttagcgttttatatttcgttcggaagtgtttgttttttcggttgttaatggttagttttgaggtatcgcgagggtttttttggataatgtagtttgcgttgtttgagtagcgacgtaataaacgttattttttaattattttggtaacgatttagtagtagcgtgacgggtatagggaaatagcgttatagacggcggggatttttgagttaatgaaagttcggattagtggtaagttcgagttgttattgagaggcgggattttcggcgtcgttattgcggtttttattttgttgttggtgggttgggttatagtaggtttttggagttatattagggtacgggagtgggtgtagggatcgttatcgcgtttttatacgtattatagtgttcggttaattattttgtttttatgagttaaggtgttttcgaaagtggagttagcgttacgcgtttttagggtttttatatttagttttcgtttttgcggtgtttagaggttttgcgcgtattttgtatttgggaagataggttttgagtgcgatcgttatttagcggaagtgtgagggttcggtttagcggtagggttagttttgggttttttgttatggttttgtttagtttataggttttaatggggttgttagcgttgttgatgggttcggcgtaggtaagtggagtgtgttttaggtttttattcgttgggatttcggtttttaggattttgaagtttagatagaggggatgttggtgttttgggatttttgatcgtgttttgtttttatacgtgggttttgggttttgttttgggagttatttatttttattattttgaatttaggtaaggggttatatcgagggatttttatttttggaattttgtggaatgagatttggaaggttgttttagggatagtgattagtatgtgtattttgtttagtggtgatgaaatggaagtattttggggattgtcggtttttatttagtttggtggaaatagggaagggaaattaatagttaggtttggaatggtagtttgaggagttggatttttattttgatggtggtgggagttatggaaggtttggagtagaggaagtaggtgttttgattttagttttaatagacgttttatggatgtttagtgggtagtagattggagggatggtgatggtggagtaggaaggttagtgaggagttgatagatgtggtttagatgtgtgttttgggtagttggatagaggggtgttcgtggaggtaggatagatggttggtttttgaatttgtttaaattgggttatggattatttgatgtgggatagtgaaagaaagtgaaatgttaagattgatttaaggttgagtgtagtggtttatatttgtaattttagtattttgggaggttaaggcggttagattatttgaggttaggagtttaagattagtttggttaacgtggcgaaattttatttttattaaaaatatagaaaaattagttaggatatggtagtgtgtatttgtaattttagtaatttgggaaattgaggtagaagaattgtttgaatttgggagatggaggttgtattgagttgagatcgtgttattgcgttttagtttgagtgatagagcgagattttgttttaaaaaaaaaaaaaaattgtcgggcgtggtggtttacgtttgtaattttagtattttgggaggtcgaggtaggtggattattaggttaggagattgagattattttggttaatacggtgaaattttatttttattaaaaatataaaaaattagttaggcgtggtggtgggtgtttgtagttttagttattcgggaggttgaggtaggagaatggtttgaattcgggaggcggagtttgtagtgagttaagatcgcgttattgtattttaatttgggtgatagagcgagattttgttttaaaaaaaaaaaaaaaaaaattgattttagattttttagatgtggaagttggtgtgaggagtagattttagggggaagataaagagttggattttggttatgttgtatttgagatgttttagatattattaaattgaggtgttaagtagattattaaatatgtgattatgaaattatgtcgggtttaggttggaaatatttaagggatggatgtttgtgtgtggatattgtatgtagttgtgggttgggtttaagatagtggttgagttttttgagtagagagtaggtttaggataatagtgaagtatagcggtaaaagtaggatgagagttgggttttggtttaggttgatttgtttttttatagtttattatattgttgcggttattttttttgtggttagggtatgttatttttttttaaatagggttttggggtttttgttaggttggtggagtggtaagattagaaagggttagtttaagttgagtttttaagttaaggtgggggttagtggattttggatttgagtgttaggaagagtaaggatagttatgattggggaggagataatatatataaaggtaaagatattagagggaagagatatttgagatttgtttatggttttgggtagttgatggttgaaggaatagggttggtaggggaggtattgatttgaggggttatgattgttttttgtagtggggtttttggagttttgtagttggtttggattaggaatggatttcggttgtatttgttaggtatgttatgtgtatggtgagatgttagggagaatgtttatagtgtgaatagggaggggttggaaatataagaattgtatggtttgaggagtgatatgtaaaggtgagagaatgtgaattattgggtttatggttttggtataagaggtttaagaaagggaagtttaaatttttttatgtttgggaggtatgagttagaagatataaggaaaattggttagtaggagggaggaggaagtatttatttgtttatttgtttattgtttttttaggttgggttggtttggatatagtgattagtgggattattaggagagaggggtattattaattttagggtatgttaggtgggggttttgaggaagaagataagttgtggatgggtgagtagtgggtggattgagaggattataagaaaaagagatattagtggtagatgtattaggattttgagttatatagtaaggttttgtatatttttatttgattaattgtttgtttttttgttagtatattttttggttttgtggtttagttgtttttatattgaagagtatggtaatttttgaagatgtggttgtatattttttttaagaggagtgggagttttttgatgtagtttagaggtatttgtattatagtgtgatgttggaaaattttgagtttgtgattttatttggtaatgttttgttttagtatggtgatgattattttatgttttgtgttttttttttatagaaagttttgtttattttaaagttagattatgggtattgtttttttttcgggttttttgttgtaggtgttggggtgttgaggttttgttgtgtgtattttttttgtttttttttgagtagttttatgagtttttttaatagttgttgtttaggagttttgtggaggtaaaggttggggattagatatttttagtttgtttaatagattttattgagatttattaatttttggtcgggttatttagtatgaggttatgtttagattttgttttttttttaatgagattttttttttttttttttttttttttttttttttttgagatggagttttgttttgttttttaggttggagtgtagtggcgtgattttagtttattgtaagttttgttttttaggtttacgttatttttttgttttagttttttaagtagttgggattataggtgtttgttattatatttagttaattttttttgtatttttagtagagagggggttttattatgttagttaggatggttttaattttttgatttcgtgatttatttattttagttttttaaagtgttgggattataggcgtgagttattacgtttagtttttagtgagatattttttaaaaatagttttattaagataaattatataatttattttttaaagtatatagtttagtgatttttatatgtttttatatggtataattattgttataatgtaattttagtatgtttttattatttaaagagaaattgtaggttttattagtagttttattagttgttattttttatgtttttttattttttttttttcggttttaggtaattattaatttattttttgattatatagatttacgttttttagatattttatagaatattatgtatttttttgtgattggtttttttttagtatgtttttgaagtttattaatgttgtagtatgtattaatattttatttttttttatagttaaatattttagtgtatagaaagattatagtttgtttatttatttattagtggatgagtatttggtttgtttttattttttaggtgttagaaaaaaatgttgttatagaagttgggtaaggtgtttataattcgtttatttaggaggttgaggtaggaggattatttgagtttaggagtttgagattaatttgggtaatatagtaagattttattttaaattttaaaaaaattttgttatgaatagttttgtatatatttttgtgtggatgtttttagtttttttgtgtagttttgtagaagtagatttgttaaattgttttttaaattggttgtattattttatatttttgtttgtagtgtataagtgttttagtttttttattttatttgttgttatttatttttttttattatagttatgttagtggatgtgaagtggtattttattatggttttggtttttatattttttatgtttaaggatgttgaatttttttttatatgtttattgttattgtgtattatatttttttttagagaaatgtttatttaagttttttgatttatttttgtgtttttattttggtgaggttttttttattttgttgtttggttggtttttattttgttaatagtaatgggtttttttttattttgatgatggttttgttggtttgttagtaatttttgggatttttttttgggtgtgaatttttgggtaatatttttaatgaagttaattatttttattaagtggaatttttagttaattggtatttttttatttttaggtttttggtatggagtagagggtgagggggtttattttaagtagaatgtttttgtagaagtgttataggttaggatttttaatgtagatttttttattaagaaagttaatttttgtgatatgtgtgggttatttttgaaagatattttgtatttggttgagtattagggaatatagtttgaggagaaattttatatatgtggagtatgtgggagagatttttggttgaatgtaaatttttattagtattagaaggagtatagtggagggaagttttttagatggtataaggatagggacgtatttatgaagagttttaaagtttatttgttagagaatttttttatttgtagggaaggtgggaaggttattttgggtagttgtgattttttttagttttaagttgttgatagtgggtagaagttatattttaattttgggtagtttttagaagtttgtattatatagaaatttttcgagtgtagtaattgtggaaaagtttttttgaagagttttattttttttaattatttgagaatttattttgaagagatattatttatatgtttaataggtggaaattttttagaggagaaattaatttttggtaataaaaagttttatattggggaaatattttatgtgtgtaaggagtgtgggaaggtttttagttatttatttaagttgaggaagtattagaaattttatattgaagtaaaatattatgagtgtattgtatgtgggaaaatttttaattataaatttatatttgtttattattagagaatttatttaggagaaagattttatgagtgtgatgaatgtgggaaagtttttagtaatagattatattttattcggtatgagaaagtttatattggagaaaggttttttgagtgtttgaaatgtggaagagtttttagttaaagttttaatttttttcggtattagaaagtttatatataggtaagattttatgagtgtagttaatgtggtaaattttttagtcgaagttttgtttttatttagtattggagagtttatattggagaaagatcgtatgaatgtagtgaatgtggaagagtttttaataataattttaattttgtttagtattagaaagtttatatcggagaacggttttttgagtgtagtgaatgtggaagagattttagttaaagtttttatttttttcgatattagaaagtttatattggagaacggttttttgaatgttgtgattgtggtaaagtttttagtaatagttttatttttatttagtattagaaagtatatattgggtaaaggttttatgagtgtagcgaatgtaggaaattttttagtcgtagttttagtttgatttagtattggagaatttatattggagaaaagttttacgagtgtagtgagtgtgggaaagtttttgtttatagttttatttttattgaatattggagagtttatataaaagaaaggttttatgagtgtaatgaatgtgggaaattttttagttaaaattttatttttattaagtattagaaagtttatattggagaaaagttttataaatgtagtgaatgtgggaaattttttagtcgaaaatttagttttatttgttattggagagtttatattggagaaaggttttacgaatgtagtgaatgtgggagagtttttagtagtaatttttatttggttcgttattagagagtttatatataagaaaggttttatgagtgtatttagtgtggaaaagtttttagtgaaagatttatatttgttcggtattagaaagtttatattagagaaaggatttatgagtgtagttagtgtgggaaattttttagttatttttgtaattttgtatagtataaaaagatttatatttgagtggagttttatggaagtggtttttgtgagaaaatttttagttaagttaaattttatgtagtagaatttttatattagaaaaattatttatatgtattgttaatgtggaaaagtttttagaagttattttgtttttgattagtttaggaatttttgtagggttattttatttatgtagtataaggtagaagttatagttattttttattttgtttggatttaaaaatttgtagtagttttgtttttatgtatggggaaaatagtattttgagtttttttttttgtgttttttagggatttaggattgtgtttagttgaatcgatgttggttgaggtttttaagatgtgttattgaggttataaattattttttattaggaattatttaggtatgtttgtattaattggtgataataaagattttattgattaggttatttttaattttagggttttgttggggtagttgagaaaatgaatggatagattggggagtgttttttgggggtataaaatttgtttaagggtatagtagaagagcgggtagttgttttgttttgttgtagtttattttgtattgttgtgtgaaagattgggaaagattgaaaggttttggattgaatatagtggtttgttttagttatcgtagggtttagagtttatttagaggaaaaataaatttatttataatattaaaatagttatagggttattaaggtaaagatttagaggggtttatggaggattttatgtgtatagagaaatattggatgtgaggtaataattagggatttgggtagattggtgaattagggtatatgttattatggataaaggaatagttatagttttttattaattgggattgtgtagggtgagggtgtgtagaataattttagagttatagatttttgtatttgttatgttaaagtttttgttatagttaaagtagataaatgtaatgttatgtatatttattttattttttttaaattg

SEQ ID NO: 216 - DNA, 8260 bp, Artificial Sequence
  chemically treated genomic DNA (Homo sapiens)
tagtttgagagaggtgaagtgaatgtatatgatattgtatttatttgttttaattgtggtaaaaattttaatatggtaaatataaaggtttgtagttttggagttgttttgtatatttttattttgtatagttttagttgatggggaattatggttatttttttgtttatgatggtatgtgttttagtttattagtttatttaaatttttggttattattttatatttagtgtttttttatgtatatagagttttttatggatttttttaggtttttgttttggtgattttgtgattattttagtgttgtagatgagtttattttttttttgggtaagttttgggttttacggtaattgaaataggttattatgtttaatttagagttttttagttttttttagttttttatatagtaatgtaaagtaggttataataggatagagtaattattcgtttttttattgtgtttttaggtagattttgtgtttttaaaaggtattttttaatttatttatttatttttttaattattttaatagaattttaagattaaaggtgatttgattaataaggtttttattattattagttagtgtaggtatatttaggtgatttttagtggagggtgatttgtggttttaatgatatattttaggggttttaattagtatcggtttagttgagtatagttttgaatttttagagaatataggaaggaaggtttagggtattgttttttttatgtatgaggataggattgttgtaaatttttggatttaggtaagatggaaagtgattatggtttttgttttatgttgtatgggtgagatggttttgtaaaggtttttgggttggttagaaatagagtagtttttgaaggtttttttatattagtagtatatgtaggtaatttttttggtatggggattttgttgtatgaagtttgatttggttgaagatttttttataaagattatttttataaggttttatttaggtatgaatttttttatgttgtgtaaggttataaagatggttgaagagttttttatattggttatatttataagttttttttttggtgtgaattttttggtgtcgaataagtgtagattttttattaaaggtttttttatattggatgtatttatagggttttttttgtgtgtgaattttttgatgacgaattaggtgggagttattgttaaaggtttttttatatttattgtattcgtaaggtttttttttagtgtgaattttttagtgataaataaggttggattttcggttaaagaattttttatatttattgtatttataaggtttttttttagtatgaattttttgatgtttaatgagaatggagttttggttaaagaattttttatatttattgtatttataaggttttttttttgtgtgaattttttagtgtttaatgagagtggagttgtgagtaaaggtttttttatatttattatattcgtaaggtttttttttagtgtgaattttttagtgttgaattaggttggagttgcggttgaaggattttttatattcgttgtatttataaggtttttgtttagtatgtattttttggtgttggatgagggtggagttattattgaaggttttattataattatagtatttaaaaggtcgttttttagtgtgaattttttgatgtcgaaggagatgggagttttggttgaagttttttttatatttattgtatttaaaaggtcgtttttcggtgtgaattttttggtgttgagtaaggttggagttattgttaaaagtttttttatatttattgtatttatacggtttttttttagtgtgaattttttagtgttgaatgagagtagagtttcggttgaaggatttattatattgattgtatttataaggttttatttgtgtgtgaattttttgatgtcgaaggaaattggagttttggttgaaggtttttttatattttaggtatttaaaaggtttttttttagtgtgaatttttttatgtcgaatgaggtgtgatttgttattgaaggtttttttatatttattatatttataaggttttttttttgagtgaattttttgatgatgaataaatgtgagtttgtggttgaaggtttttttatatgtaatgtatttataatattttattttagtgtgaaatttttggtgtttttttagtttagatgagtgattaaaggtttttttatattttttatatatatggggtatttttttagtgtgaaattttttattattaaggattgattttttttttaagaaatttttatttgttgggtatgtaaatggtatttttttagagtgagtttttagatggttggggagagtggagttttttaggaaggtttttttatagttgttgtattcgaagagtttttgtgtggtatagatttttggaagttgtttaagattggaatatggtttttgtttattgttaatagtttgaagttggaggaggttatagttgtttaggatgatttttttattttttttgtaagtgaaggggttttttgataggtggattttagagttttttataagtgcgtttttgtttttgtattatttaaagggtttttttttattgtgttttttttggtgttggtgaaggtttgtatttaattaaaagttttttttatatgttttatatgtgtagggtttttttttagattgtgttttttgatgtttagttaggtgtaaaatgttttttaagaatggtttatatatgttataggagttagtttttttggtggaaggatttgtattagggattttgatttgtaatatttttatagaaatattttgtttgggatgggtttttttattttttattttatgttaagaatttgaaagtagagaaatgttagttaattaagaattttatttggtgggaatggttgattttattagaaatgttatttaggaatttatatttaagaagaggttttagggattgttgataggttaatagggttattattagggtgaagaagggtttattattattggtaggatagggattagttaagtaatagaataagggagattttattagggtaaggatatagaaatgggttaaaggatttaaatagatatttttttaaaagaagatatgatatataatggtaataagtatatgaaaagaagtttagtatttttaaatatgaggagtatgaaaattaaaattataatgagatattattttatatttattagtatagttataataaaaaaaaataaatgataataaatgaagtagaaaaattggagtatttatatattgtagatagggatgtaaaatggtgtagttaatttggaaaatagtttggtaagtttgtttttatagagttatataagagaattaaaaatatttatataaaaatgtgtataggattgtttatagtagaatttttttaaaatttgagatggggttttgttatgttgtttaggttggttttaaatttttgggtttaagtgatttttttgttttagttttttgagtagacggattataggtattttgtttagtttttatagtagtatttttttttaatatttaaaaaatggaaataagttaaatgtttatttattggtaaatggataaataaattgtagtttttttatatattggaatatttggttataaaaaagaatgaaatattgatatatgttataatattgatgaattttaaaaatatgttaagagaaagttagttatagaaaaatatatagtattttataaaatgtttaggaaacgtaaatttatatagttagaaagtagattagtggttgtttaggatcggggggaaagggataagggaatatggggagtgatagttaatgggattgttaataggatttatagtttttttttaggtgatgaaaatatgttaaaattatattatagtaatgattatattatgtgaaaatatatagaaattattagattgtgtattttaaaaggtgaattgtatggtttattttaataaagttgtttttaaaaaatattttattgggggttgggcgtggtggtttacgtttgtaattttagtattttgggaggttgaggtgggtggattacgaggttaggagattgagattattttggttaatatggtgaaattttttttttattgaaaatataaaaaaaattagttgggtgtggtggtaggtatttgtagttttagttatttgggaggttgaggtaggagaatggcgtgaatttgggaggtagagtttgtagtaagttgagattacgttattgtattttagtttgggggatagagtaagattttattttaaaaaaaaaaaaaaaaaaaaaaaaaggaaaaaaaaattttattgggaaagagatagaatttgggtatgattttatattgggtaattcgattagggattggtgaattttagtgggatttgttaggtagattggaggtgtttgatttttaatttttgtttttataaggtttttgggtaatagttattaggaaagtttatgaggttgtttagagagagataggggaagtatatatagtagaattttagtattttagtatttataataggaaattcgagaaggaagtagtatttatgatttggttttgggatgaatagagttttttatggggaaaagatataaggtataaggtagttattattatgttgagatagggtattattaagtgaggttataagtttaaggttttttagtattatattgtggtataggtgtttttgggttgtattaaggagtttttattttttttgggagaagtatatagttatatttttaaaggttattatgttttttaatgtggggatagttgagttatagggttaagaagtatgttgataaagaaataaataattggttaaatggaaatatgtaggattttgttgtgtgatttagaattttgatatatttattattaatattttttttttttatgatttttttagtttatttattatttatttatttatagtttatttttttttttagggtttttatttaatatgttttggaattaatggtgttttttttttttagtagttttattggttattgtatttaggttaatttaatttagaggaataataggtaggtgggtagatggatgttttttttttttttttgttggttaattttttttgtgttttttggtttatattttttaaatataagaaaatttgggttttttttttttaagttttttgtattagggttatgggtttaatggtttatatttttttatttttatatgttattttttagattatatagtttttatatttttaatttttttttgtttatattgtaggtattttttttagtattttattatgtatatggtatatttgatagatgtaatcgggatttatttttggtttaagttagttatagagttttaaaaattttattgtaagaggtagttatagttttttaagttaatgttttttttgttagttttgtttttttaattattagttgtttagaattataagtagattttaaatattttttttttttgatatttttgtttttgtatgtgttgttttttttttagttatagttgtttttgttttttttaatatttaaatttaagatttattggtttttattttggtttggggatttagtttaggttgattttttttgattttgttattttattagtttgataaaaattttaggattttatttaagaagagataatatgttttgattataagaaggatggtcgtaataatgtagtgagttgtagagaagtaaattaatttaaattaaagtttaatttttattttatttttgtcgttatgttttattgttgttttagatttattttttgtttaggaggtttagttattattttgaatttaatttataattgtatgtagtgtttatatataagtatttattttttggatgtttttagtttaaattcgatataattttataattatatgtttagtggtttatttggtattttaatttggtagtgtttgggatattttaaatataatatggttaaaatttaattttttattttttttttgaaatttattttttatattaatttttatatttgaaagatttaaggttaatttttttttttttttttttgagatagagtttcgttttgttatttaggttggagtgtagtggcgcgattttggtttattgtaagtttcgtttttcgggtttaagttatttttttgttttagtttttcgagtagttgggattataggtatttattattacgtttgattaattttttgtatttttagtagagatggggttttatcgtgttagttaggatggttttaattttttgatttagtgatttatttgtttcggttttttaaagtgttgggattataggcgtgagttattacgttcggtaatttttttttttttttaagatagagtttcgttttgttatttaggttggagcgtagtggtacgattttagtttaatgtaatttttattttttagatttaaatagtttttttgttttagttttttaagttgttgggattataggtgtatattattatgttttggttaatttttttgtatttttagtagaggtggggtttcgttacgttggttaggttggttttgaatttttgattttaagtgatttggtcgttttggttttttaaagtgttgggattataagtgtgagttattgtatttagttttaggttaattttaatattttatttttttttattgttttatattaggtaatttatggtttagtttgggtagatttagaagttaattatttgttttatttttacgggtatttttttgtttagttatttaaagtatatatttggattatatttgttagttttttattggtttttttgttttattattattatttttttagtttgttgtttattaggtatttatagggcgtttgttaagattggagttagagtatttattttttttattttaaattttttatggtttttattattattagaatagaggtttagttttttaggttgttattttaggtttaattattggttttttttttttgtttttattagattaaatggagatcggtagtttttagaatgtttttattttattattattaaataaggtatatatgttggttattgtttttgggatagttttttagattttattttataggattttagaaatgggaatttttcgatataattttttgtttggatttaggatggtaagggtaagtgatttttagggtagggtttaggatttacgtgtgaggataggatacgattaagagttttaggatattaatattttttttatttgggttttaggattttgagggtcggaattttagcgggtgagggtttggggtatattttatttatttgcgtcgggtttattagtaacgttggtaattttattagaatttgtgggttgggtagggttataataggaggtttagggttagttttgtcgttgggtcgaatttttatattttcgttgggtgacggtcgtatttaggatttgtttttttaaatgtaaaatgcgcgtaaggtttttgggtatcgtagggacgaaggttgggtatggagattttggagacgcgtggcgttggttttattttcgggaatattttggtttataaaagtagagtaattagtcgggtattatggtgcgtgtgaaggcgcggtgacggtttttgtatttattttcgtgttttggtgtggttttagaggtttgttgtagtttaatttattagtagtaaaatgaggatcgtaatggcggcgtcggaagtttcgttttttaatgatagttcggatttgttattggttcgagtttttattggtttaaggattttcgtcgtttatgacgttatttttttatgttcgttacgttattgttaggtcgttgttaaggtgattgaggaatggcgtttattgcgtcgttgtttaggtaacgtaaattatattatttagaaggattttcgcggtgttttagggttggttattggtagtcgaggagataggtattttcgggcggagtgtaagacgttggttaattatagtttggtagcgggattttcgtcgtcgttttcggattattattttggtatttttcgattttgtttgtttttgaagggatcgcgttgttaggcgagggacggaattttggaggttttttgggtttatggaaataggagcgaggaaggtacgag

SEQ ID NO: 217 - DNA, 10138 bp, Artificial Sequence
  chemically treated genomic DNA (Homo sapiens)
gagttgagattatattattgtattttagttcgggtgatggagtgagattttgtttttaaaaaaaaaaaggttgggcgtggtggtttacgtttgtaattttagtattttaggaggtcgaggtgggtggataatttaaggttaggagttcgagattagtttggttaatatggcgaaattttgtttttattaaaagtataaaaattgtaaaagtaaaaagtaaaagtaaaagttgggtgtggtggtaggtattagtaattttagttatttaggagataggtagaagaattttttgaatttgggaggtgagtcgagatcgtattattgtatttcggtttgggtaataatagcgaaattttgttttaaaaaaaaagtatttataaatgttttagtgattatgattgtaagattattgtgtgtagaaatttttagaaatgtgtgttttgtagtttaagttattattagagataataagggttttgtggatttttgtagtttttttggtttgtttattttaaggttattgttgtatagataaaaaaaaaaaaggatgaagttaagagagattcggttgtttttggtgcggtttttgtgatttagtagtaatttttttaacgttgatggaaatggtttttattgtttatttgtattttttgttattgaagtaggtttgtttttacgtggtttggggagttagatggtagagttaatagagatttagtaaattagattttttgaagtgttaatgattaagattgttattgtatttattaaaaaaaaattaagttataattgatgtggaataaattatatatatttaaagtgtataatttgataagttttgatataaatgtaaatttatggaagtattgttgtaattataagaatgagtatattttatttgtatattttatttttgtttttttataatatattttagaatatgtaggtaatttttaatatttttttataattgattgatttgaattttttggaattttattttagatattataaagtgtgtatttttttgtgtttttatttataaaatttttttttaggtaagggtttgaggttaattttggaggtgatagatatgtttaatattattgatagggtgatgattttaaaagtgtatatatgtgtgtgtgtgtgtgtgtgtgtgtgtgtgtgtgtgtatatttattgttttaatatgtgtagtatattgtatgttgattatattttaatgaatttataaaaagttattttatttaaaaatttgggttttttatttttattggaaattggataatttgatagtttgtagtgttttgaaatagtatggattgggtgttttgtttttagtatatgttttatgttttttaatattgttttttaggaaatagggaggaatagttgttttttaggatttgttgagtggttatattttttgaaggttagaaaagtaataaggtgatcgttttggataaaattttgagtttaaaattttgtttgaattagtagtttttaaatttattgtgtatattttataatttttaagaatatatatattaagtgaatatttttatgtttataattgtgaaatggtttgtttagggttgttattttttaatttttttttttaattatttttttattaaggaagtatatgtattaattatggtttttgttttttgtattatatgttttgatattttaaaatttttgttggtgatagagagatttattttattagaggtagttaatttttaaaaatagtaaataattattttgagagtaaggtaagttaattattttttttatttaatttttatttattaagttaatattttttttgtattaaattattttagcgttattgttagtgattttgtagtagtttgtagtaattttggtttttgtttttttagaagaaaatttaatcgaggaggtagaggttggtttaaggtataggaagagattaaggtaagttttttttagtaggagtgagagtttattaaaatgttttagagtaggagtgaaaggaattaaagtatatttggaaaagggttaagtggataatttgagaggttaagtgttttatttgatttttggtttgggattttatatatttgtttattttttaggttttttattttttttttttcggtaggttgttgtttgattattgtatgtatagtggtttgttagtatttgggaggggtcgtatgtagtttgtttattgaagttatatatatatttatttggggtgatttttttttaataagttatgtatttttagaggaaggttaaatattagttaaattttgttattttgttttattttgtgtatgttcgaaattttattaggggttgtggtttattggttttaggtgttttttatttgttggaaaattttttttttttttggtattaattatggttatttattattttagagggatagttttatgtttttttgttttttatttaatgagagttggatatttcgggggttttttttttgttttgtttattattttagaggaaaagatttatgattgtttgtttttgattttaaaattgtttgatatttttggggttttttttttttgttttatttttatttatttattttaatattagggtgagggtatgaggtaattagagattatttttgtaaatcgaagttaattagaattatttagattagttagtatttagttgtttgttttgatttggtttaggtttttttttagtttttgtttttttttttagattgaaatttgttttttttgtggttttgtatggtatattgtattttttatttttagggaaattttgagtaatattaaatttttattttattggtattgagttttttatgtttttttttaataaagatttatttataaattggttttttttggttatgtaatattatatatttttttagtattttttaatgtttttatttttttttttttttattatgtttgttatattttaatattttatataatttagtattttttttatattttttttttttttttgagtatagcgtaagttattggggtttgttttttgttttgtaaatgttttatgtagttaagatagtgtttgaaatatagtaggtgttttttgaatattttttagaattatgaataagtataatattatagtatttttgtttattttaatattttgatagtattttttaaatgttttttttatttttttttttaggtattattgagtgtttttaagaatgaaaagaggtttggtatggtggtttatatttgtaattttaattttttgggaggttgaggtgggaggattttttgagtttaagagtttgaggttgtagtaagttatgatcgtgttattatattttagtttgtgtaatatagtgagattttgtttttaaaattaaataaataaataaaattatattttggagattaaacgttgtttgtagttatagttttaatatagttgtgtgtttagttttatttgtttattttttagaatttaatgttttttgtttaaattttgttgttattttaatcgtttttatttattatagatatgtttttttaggtttatttcgttatgtatttgtgaataattatagaattattaattttgagtaatttggtcgggcgcgggggtttttttgtaattttagtattttgggaggttgaggcgggtagattacgaggttaggagatcgagattattttggttaatacggtgaaattttatttttattaaaaatataaaaagttagtcgggtatggtggtaggcgtttgtaattttagttatttcggaggttgaggtaggagaatagtgtgaatttgggaggcggagtttgtagtgagttatggtcgtattattgtattttagtttgggcgattgagtaagatttcgttttaaaaaaaaaaaatataaaataatttttgagtaatttaaataatttataaatgtttttgtttttttttttttatatattcgttttttttttttttaaaattataaataaattttaatttttaatttagatattgtcggtgtaattgtaggtgaaatgagaattattttttagttaagaaatttgattttaattttttaaatttttatttttgggtttagatattatatttttagtttttgttttggtatataaaagtatttataatggtttttttttttagataagaaatattattaaaaggaaatagatatattttaatttttgggttaggaatttttatttggataaaagaatattttttttttggttggatattagtgattatataggtaggaaaggtgttttttttgattattttttttcgtttgtttttttttttatggtttttttaggtattttttttttgaggaaattagaggaagagttttatattagtttatttgttttagggagttttagtatttttttatagttattgtttggagattatttttttattttatggttttgtttggggataattttttgttaattttgatttaattgaggtttataaaattgatttaaagtttttttttatagtatatatattttttaaatgaaggaaatttgattgaattatgagtggatttagagtgatattggatgttgtgtgtttatttggtggtgtggttttagggaatatttgtaagaatatattttaatatttcggggatttttgtagattttattatataagatttggttgagggttttttaaaaggagcgaagttacgttttgattttagagttttagggtataattttttagcgtttttcgtagtattatttggtttttgtttagcgtgtaggggagttagtcgttattacggttaagtgtatatgagaattgtattgtttagaaatttgtgcgtcgttcggcggcggtatttttaggggcgtttttttgcggacggaagttttttgggcgggattttcggtatttttttcgcggtggatattttgtcggtttttaggtggaattatcggagtagaagttcggggttgttgggcggtttcgaggtgacggaagcgggagggtgcgggagaagtcgttgttcgttttgcggagtggttcgttagcgaagatttcgtttgcgttttcggggacggacgatcgcggtgttagggtttcgcgatttgggattttttcgcggtttcgggtggtttacgaattgtgatggcggcggtcgcggtgatgggttcggcgtaggtgggtgttgttttttttagattttcgttcgttttaaattttgaagttttaaatgaggagcgtttgtttgagtttttgtagcgtaggttttagtgtttaaggtagcggggcgttggtgggtgggggcgagtgtgattggtagaggggtagtttgagtataggtttggagttggattgagttcgtagtagtcgggagcgtgtgtgaatcgtagttaggtttgtaatgtcgaggggagaagttgtttttttattgcgaggacgataggagttatggcgggttttgaatggtggagggaagggattcgaaaaaggatttttaaagtattttaatgtttgttgaggaggaaatcgattatagtgaggtagaaacgatgaggatggaggtaaggagacgtttgaggaggtttttgtaataaattttagaagtgttgcggtggtggttgggttagagtagtggtaggaggggttgggtggggaagttatgagattttgggtagatttttaaagatggaattaatggggttttttgtcgtattagatgtggtcgtgagtgaatgtagggaggaaagggttatttagggtttttttggtttgtttttttttttgaacgtgtgaaagaatggaaattggtaagttatagtagggagtacgttttaggggtattaggaattgggttttggatttggtgaatttaaggtgttttgtattggaggtttattacgggtagttgaatatgtaggtttggggttttagagagggagttgtgttagagattttaatgggtgaggtataaggttaaagtttgtagtagattagatttagagggtggaattttaaggaagttattttgtgtggtttttgaagtgagaggtgggtttagggtggaaggttagggatgaaggggtggatatttaagattttttttagaaaggaggggttttggtatgtgaaagtattttagatggtgttgttggaagttaatgtttggtgttgtaaagtgaaattagtatttaggtaaaagtttttttagtaaggtaatttatttttgtgtaagtgtgttgtttgtgttaattacgattttaagagtatattgaataaaggagggaaggggtttttatttttaatttatagtttttatttttttttgtgttatttttttatgggttggggtcggatcgtttaatttaagttgagttaattgggtatttgtgagtattttttaaataaggaagagggaaggggaaggtgagttatagtggtgggatatgtgagttgtgtaggacgtgtggttttggcgggggtaatgggtgtaaagtgagtaagggaatagatgtgaattattggttagtgtttataggaaggttgtttatagtaattaggggtaaggaggtatggagaataagaaaggtttgagaataaagaataaggaagttaataggttaaatttttgaagaggaattttattatattttatagtgttagtaagaggagagggttgtagagtataagtagtttggtttgtattggagattaaggtgagggatgtagtaggtttgttattttataggtttagtatgtttttatgggcgttgtttgtggagtagttttatttttaattagtgtattggtgttttagttatttaaatttttaggtaagtagaattgatgaatatttttaatgaaggattattgtagtttttttttagaggaatatgtattaggtaggttggtttagtgtaagggttagtgtatattttgtaagtacgtagaaggaattaaaaaatgtatgtataaagtaagggaaatttatattagtatttaatgattggttaaaatattaagttgttttgaagtattttattataatggaaaaattttaattaaatttttttaaaagttttaaagtaggtaaaataaatttaattttttaaaaatttattagtttatttgtatggatagtagtagttgttttaaaggtatttgagatgtatagataagtttgatataaatagtagttttatgaggtgggtgttattattatttttatttttaagatgaggatatttagacgttggtttttatgtttatatagttggtgggagttagtattgagatttgagtatttgaagttagagaggtaatttaaaattatttttgttaaagggtagggtaggtagggtttagggaaatagtttagtcgatgagattttattgtgggaatttgttatttttagtttttttttttttgtgaggttgttatggtggtagaaatttatgatttttatttagatgagagtagattgttttaggtttttatttagtttaatatatttttattattttagtaatttagtgtggagaatgatagtgttttgggattttttagtgttttttttgtttatcgtttttggaggttttgtagttatttaaagttttgtgttgtaaattttgttttggaattatgtggaagggtttttatttttggtaagtaatgggatgaaatgtggaatattattttaggtataggaattagtatgtgtaaatatttaatttaaggttaaattaggagtgtttagggaattttaggtttttattatgtttggtgggattagatagtagggataggatttagtttagaaatggtagtttgaggatttgggtttgtatgttgagagaattgggagttattgtaggtttggagttaggagggagtgatttgattttggttttaattaattttttttgtatagtgaaaaaagattgtgggagtgaggatgaaggaaggaatattattgaggagtttaatgtaatagtttaggttggattagagtggtcgttgtagaggtgggagatgtggatggattttgaattattttttttaaagtgggattaattagattttttgatgtggaagatgagaaagaaaaggtaaggggtgaaggaagattttggattttttagtttgagaagatataaagatgttattaattgaagtgataaagttggtggtaggagtattttttagaggtaatattaggagtgtagtttggttatgtggaatttattatgttttaaagatatttgagtggaggtgttaagtagatagttggatatagagatttgaagtttagagaagggatttaggttggagttatttatagggtggtagttagtatgtggattaggatggagttttgtttttaatttagagagagaatttttaggttatggtgatagtgttattagtatattgtaagggtagatatagtagggtagaggtaggggttattttagagtttagaagagggagggaaatgtttttgggaggaaggggaataatagggttaggtaggtggtaaagcgttttaggtagagagtggatgtgaggtgaagtattgtagtaatagaagtgaggtggtagtgaggttagagttagtgtttatttagttttttatgtgttttttaggtttttatggtgatttttggtgggatttgtggagttttagttaagttagtgaattagtttagggatagattgggttagtaggtagaatttttgtgtttggggtaggtgtttagtgagtgtaggttttgaatgagttaaatgttgagaagtttgtgattgattttagtagtataataataaagtagaaaagggttgagtttatttgggatttgtatatggttttggattgttgaattgatttatgaaatagagttaggaggggaagatttaataggtggatttagggtaatttatggtagtgtggtcgttgattaggattagatgtaattttggatgtattatttaagtattttttggatgttgtgtgtagatttgtatgtggggaagttatggaggtattagtgttgtgggtgtttatagatgtaaaggaggtatagttaaaagggtgatgtgtatatggagatggagtgtgaatttatgagtttagagttttggtatggagggtttttgaaagaatgtttagtttaggtttgtgtatgaggaataatttgttgatttttagggagttggttgataggagaagggttgggttttatatattaggtttatggtgttttatttgtttatttgtttgttttgagttggataaaatgattaatggaatatgagtcgagaataggtattaattatattagggtttgttattttatttgagttagatgtgataaggagttttggagagagaggttgtttttaagtttagttgtttattttatatagggttatgtgatttttaaggatttatttgtttattttttttaggaggaatgggagttgttggatgaggtttagagatttttttattatgaaataatggtttttgtgtttcgtatttatagtttttttgggtaaggttttagtattttatttttttgggttgggttttattttttttttttgttttaggggttgtttttttttttttatagttagagtatgggtattgtttttttttttgatttttttatataggttttttgggtgtttaggtttagttagatgtattggttttttttttttttgtgttttttaatttttgttgttttgaagttttgttaggaagggtttggaggttaggggttttaaggtgatttagtgaattttgtttggtttttttttggttaggtgattgtttatatttatgatatttttggattttaggttttattcgttttttttaattgtaatttttttgagtttgtttgtgtttttaattttagttattatggttattatttgtgggtttattgtattgtttttgtaggataattttttgaggtttattttgtagtatttgtttttttgtaattttgtatgggtgggttattttggttagtgtttttagtttgttttattttttttttatgttttgtattttttaga

SEQ ID NO: 218 - DNA, 10138 bp, Artificial Sequence
  chemically treated genomic DNA (Homo sapiens)
tttggaagatataaagtataggggaaaggtgaaataggttgagagtattagttagagtagtttatttatgtaaaattgtaagaaaataaatgttataaaatgaattttagaaaattgttttgtaggaatagtgtagtgggtttataagtggtgattatgatgattgaaattgaggatataggtagatttaaggaaattataattagaggaagcgggtggagtttggagtttagaggtgttatgagtgtggatagttatttggttagggagaggttaagtagaatttattgggttattttaggatttttgatttttaaattttttttggtaaggttttagggtagtaggagttgaggaatatagggaagagaggggttaatgtatttagttgagtttaggtatttaggggatttatgtgagggaattagagaagagagtagtatttatgttttagttatggaaaggaaagagtaatttttagggtaaaaaggaagagtaggatttagtttagaaaaatgggatattggggttttatttagggagattataaatgcgaagtatagaagttattattttataatagaagagtttttgagttttatttagtagtttttattttttttaagagaagtaaataaataaatttttgaaggttatatagttttgtgtgaggtggataattgagtttaaggatagtttttttttttaggattttttgttatatttaatttaaatgagataataggttttggtgtgattggtgtttgttttcgatttatattttattaattattttgtttagtttagaataggtaagtggatagataaaatattatgggtttggtatgtaggatttaattttttttttattagttagttttttggggattaatagattattttttatatataaatttgagttaagtatttttttagaaattttttatattaaagttttgggtttatgaatttatattttatttttatgtgtatattatttttttggttatattttttttatatttatggatatttataatattggtatttttatggtttttttatatgtaaatttgtatatagtatttagagaatgtttggataatgtatttaggattatatttggttttgattaacggttatattgttatgggttgttttgaatttatttattaaattttttttttttggttttattttatgggttaatttagtaatttagaattatgtgtagattttagataaatttagtttttttttgttttgttgttgtattattgaggttagttataggttttttaatatttaatttatttaaaatttatatttattgggtatttattttaagtatagggattttgtttattgatttaatttgtttttgggttaatttattagtttgattgaaattttataggttttattaaaggttattatggaagtttgaggagtatataaagagttgaataagtattggttttggttttattgttattttatttttattattatagtattttattttatatttattttttgtttggaacgttttgttatttgtttgattttattattttttttttttttagggatattttttttttttttttagattttaagatggtttttatttttattttgttgtgtttgtttttatagtgtgttgatggtattgttattatgatttaaagattttttttttaaattggaagtaaagttttattttgatttatatgttggttgttattttgtggatagttttaatttgaattttttttttgaattttagatttttgtgtttagttgtttatttgatatttttatttaagtgtttttggaatatggtagattttatatagttaaattgtatttttgatattatttttgaaaggtatttttattattaattttgttattttagttgatggtatttttatatttttttagattaaaaaatttagggtttttttttattttttgtttttttttttttattttttatattagaaaatttggttggttttattttaagaaaaatgatttagaatttatttatattttttatttttatagcgattattttggtttaatttgaattgttgtattaagttttttagtggtatttttttttttatttttatttttatagtttttttttattgtatagaggaagttggttaagattaaagttagattatttttttttagttttaaatttgtagtggtttttaatttttttagtatataaatttagatttttaggttgttatttttgggttgaattttgtttttgttgtttgattttattagatataatggaggtttgaggttttttgaatatttttagtttagttttaagttaagtatttgtatatgttggtttttatgtttgagataatgttttatattttattttattgtttgttagaaatagaaatttttttatataattttaaaatagaatttataatatagagttttgggtgattgtaggatttttaagaacggtaggtagaagggatattgaagagttttagaatattattattttttatattgagttgttgagataatgggggtgtgttgggttaagtgagggtttgagataatttatttttatttaggtaggaattataagtttttgttattatggtaattttataagaggagggaagttgggagtggtaggtttttatagtgggattttatcgattgaattgtttttttaagttttgtttattttgttttttggtaggaatgattttgggttatttttttaattttagatatttagattttagtgttggtttttattagttgtgtgaatataaagattagcgtttgagtgtttttattttaaaagtggggataataatggtatttattttatagggttattgtttgtattaggtttgtttgtatattttaagtgtttttgaaatagttattattatttatgtaaatgaattgatgagtttttgaaaaattaggtttgttttgtttgttttaaagtttttaagaaaatttggttaagatttttttattgtaataaaatattttaaggtaatttaatattttgattaattattaagtgttagtataaattttttttattttgtatatatattttttagttttttttgcgtatttgtaaggtgtatattagtttttgtattaaattagtttatttgatatatatttttttgaaggggagttgtagtgattttttattagagatgtttattaattttgtttatttgagggtttgggtaattgaggtattaatgtattggttggggatgggattgttttataggtagcgtttatgaaggtatgttgagtttgtagggtggtaaatttattgtattttttattttggtttttagtgtaggttaggttatttatgttttatagttttttttttttgttgatattataagatataataaaatttttttttaaaggtttagtttgttaatttttttgttttttgtttttaaattttttttgttttttatgtttttttgtttttagttattataaataatttttttgtaagtattaattaataatttatatttgtttttttatttattttgtatttattgttttcgttaaaattatacgttttatataatttatatgttttattattgtaatttatttttttttttttttttttttatttggaaaatatttataaatatttaattggtttagtttagattaagcggttcgattttagtttatgggggagtgatatagaggaaggtagggattatgggttagagataaaaatttttttttttttttgtttagtgtgtttttgggatcgtgattaatataggtagtatatttgtatagaagtaaattgttttgttgagaaaatttttgtttgagtgttggttttattttgtagtattaagtattgatttttaataatattatttagaatgtttttatatgttaggattttttttttttggaaggaattttaagtgtttatttttttatttttggttttttattttaaatttattttttattttagagattatataaaataatttttttgaaattttattttttaaatttgatttattataggttttgattttatgttttatttattgaagtttttagtataattttttttttagaattttagatttgtatgtttagttattcgtgatgaatttttagtgtagaatattttagatttattaagtttaaaatttaatttttgatgtttttgaaacgtgttttttgttgtgatttattaatttttatttttttatacgtttaggaaggaaaataggttaaaaaaattttggatagtttttttttttttatatttatttacgattatatttgatgcggtaggaaattttattggttttatttttaaaaatttatttagaattttatgatttttttatttaattttttttgttattgttttggtttagttattatcgtaatatttttggagtttgttgtagggatttttttaaacgtttttttgtttttatttttatcgtttttattttattgtagtcggttttttttttagtaaatattggaatattttaaaaattttttttcggattttttttttttattatttaaaattcgttatggtttttatcgttttcgtaatgaaggagtaattttttttttcgatattgtaggtttgattacggtttatatacgttttcgattgttacgggtttagtttagttttaaatttatgtttaggttgtttttttgttagttatattcgtttttatttattagcgtttcgttgttttggatattggggtttgcgttgtagggatttagataggcgttttttatttggaattttaggatttggggcgggcgaaagtttgggaaaggtagtatttatttgcgtcgggtttattatcgcggtcgtcgttattatagttcgtagattattcggagtcgcgagggggttttaggtcgcgggattttggtatcgcggtcgttcgttttcgggggcgtaggcggggttttcgttggcgagttatttcgtagagcgaatagcgatttttttcgtattttttcgttttcgttatttcggaatcgtttagtaatttcgagtttttgtttcgatggttttatttaagagtcgataagatgtttatcgcgaggaagatatcggaagtttcgtttagagagttttcgttcgtagggagacgtttttaagagtgtcgtcgtcgggcggcgtataggtttttgggtaatgtagtttttatgtgtatttggtcgtggtgacggttaatttttttgtacgttgggtaaaggttaaatggtattgcgaggggcgttgagaaattatgttttgagattttgaggttagggcgtggtttcgttttttttaaaggatttttaattaggttttgtgtagtgaggtttgtagggattttcgaaatattgggatatatttttatagatgttttttgaagttatattattaaatggatatataatatttaatgttattttgagtttatttatagtttagttaaattttttttatttaaaaaatatgtgtattgtagagggaagttttgagttagttttgtgagttttagttgggttagagttaatagagaattgtttttaggtagggttatggagtggaagaatggtttttagatagtggttatggagggatgttggagttttttgaggtaagtggattaatatagagttttttttttggtttttttagaaaaaaaatatttgagagaattatgaggaggaagataggcgagagaaggtggttaaggaaggtattttttttgtttgtatggttattaatgtttaattaaaggagaaatatttttttatttaaatgagagtttttagtttaaaagttgagatatatttatttttttttggtgatgttttttatttgaaaagaagaattattataaatgtttttatatgttaagataggggttgaaaatgtggtgtttgaatttagaaataaagatttggaaaattgggattagattttttggttgggaggtgatttttattttatttgtaattatatcgatagtgtttgaattgagaattgagatttatttatggttttaaaaaagaaaagggcgagtgtatggggaaagaaagataaaaatatttgtgaattgtttaaattatttaaaagttgttttgtgttttttttttttgagacggagttttgtttagtcgtttaggttggagtgtagtggtgcgattatagtttattgtaggtttcgttttttaggtttatattatttttttgttttagttttcggagtagttgggattataggcgtttgttattatgttcggttaattttttgtatttttagtagagatggggttttatcgtgttagttaggatggtttcgattttttgatttcgtgatttgttcgttttagttttttaaagtgttgggattataggagagttttcgcgttcggttaaattatttaaagttaataattttgtagttatttatagatatatgacgaaatggatttggagaaatatatttgtgataagtgaaaacggttaagatgatagtaaaatttgagtaggagatattgaattttgagaagtgagtaaatgaagttgagtatatagttgtgttagaattatgattataagtagcgtttagtttttaaaatgtaattttatttatttatttaattttggagataggattttattgtgttgtataggttggagtgtagtggtacgattatagtttgttgtagttttaaatttttgggtttaagggatttttttattttagttttttaaaaagttgggattatagatgtgagttattatgttaggtttttttttatttttgaaaatatttaataatatttggaaggagaagtaaagaaaatatttagaaagtgttattagaatattaaggtgaatagggatgttgtagtattatgtttatttatagttttaagaaatatttaaggaatatttattgtattttagatattattttaattgtatgggatatttataaaataagagatagattttaatagtttacgttgtatttaagaaagaggaggaaatatgaaaaaaatgttaaattatatggaatgttagaatgtggtaggtataatggagaaaagagaaggtgaaggtattgagaagtgttggaaagatatgtaatattatatagttaagagaggttaatttgtggatgggtttttattggaaaaggatatggagagtttaatgttagtgaaataaaagtttaatgttatttagaatttttttagaaatgggaagtatagtatgttatgtagggttataggaggaataggttttagtttaaaggaagaagtaagagttaggggaaagtttaggttagattagagtaaatagttgagtattggttagtttgaataattttggttggtttcgatttataggggtggtttttagttgttttatatttttattttggtgttagagtaggtagataagagtagggtaggagagagggattttaggaatgttaggtaattttggagttaaggataggtaattataaatttttttttttgagataataaataaaataagagagggattttcgagatgtttagtttttattgggtgaaggataggaaagtataaaattatttttttgagatgataagtggttatgattggtattaggagggaaaagagttttttaatagatagaaaatatttggagttagtgaattataatttttgataaggtttcgagtatgtataaaatggggtaagatggtaaaatttgattggtatttgatttttttttgggggtgtatgatttgttaagggaagattattttaaatgagtatatgtatgattttagtaaataaattgtatgcggttttttttaagtattggtagattattgtgtatgtagtagttaagtaatagtttatcgaaggaaggagaataaagagtttgggaaataagtaaatgtataaagttttaagttaaggattaagtggggtatttgattttttaagttatttatttggtttttttttaagtgtattttgattttttttatttttattttaaaatattttaataaatttttatttttgttaaaaaaaatttgttttggtttttttttgtgttttaagttaatttttgttttttcggttgaatttttttttgaggaggtaaggattaaaattgttgtagattgttgtaaaattattggtagtaacgttgggatgatttagtgtagggaaagtattggtttggtgagtaagagttagataaagagggtagttggtttgttttgtttttaaggtagttgtttattatttttagaaattagttatttttggtagggtaagtttttttgttattagtaagaattttaagatgttaagatatataatataaaaaatagaaattatgattaatatatatgtttttttaatgagagggtggttgaaaaaaaaggttgaggaatgatagttttgaatagattattttataattataaatataaaaatatttatttaatatgtgtgtttttggaaattataagatgtgtataatgaatttgggggttattgatttaggtaaggttttaagtttagaattttgtttaaaacggttattttgttatttttttggtttttagggaatatggttatttagtaggttttgaggaatagttgtttttttttgttttttgaggaatagtgttggggaatatgggatatatgttggaaataagatatttaatttatgttgttttaaaatattgtaggttgttaagttgtttagtttttaatagaagtgggaggtttagatttttaaatggaataattttttataggtttattgaggtgtaattaatatgtaatgtattgtatatattaaaatagtaagtatatatatatatatatatatatatatatatatatatatatatgtatatttttgaaattattattttattaatggtgttggatatatttgttatttttaaagttaattttaggtttttatttaaggggaagttttataaataaaagtataaaaaaatatatattttatgatgtttaaaataaaattttagaaaatttaagttaattaattgtaaaggaatgttaaaagttgtttgtatattttggaatgtattataaaagagtaaaagtaaaatatgtaggtgagatatgtttatttttatgattataataatgtttttatgggtttatatttatgttagaatttattaagttgtatattttaaatatatataatttattttatattaattataatttgatttttttttaatggatgtaataataattttggttattgatattttaaaaagtttggtttattaagtttttattgattttattatttagttttttaggttacgtagaggtagatttgttttagtggtaggaaatataggtgagtaatgaaggttatttttattagcgttaagaggattgttattggattataaaagtcgtattaaggataatcgaattttttttgattttatttttttttttttttgtttgtgtagtaatggttttgaagtaaataggttagagaggttataggaatttataaaatttttgttgtttttagtaataatttgagttataagatatatatttttagagatttttgtatatagtgattttgtagttatagttattggaatatttgtggatattttttttttgagatagagtttcgttgttgttgtttaggtcgaagtgtaatggtgcgatttcggtttattttttaggtttaagagatttttttgtttgttttttgagtagttaggattattggtgtttgttattatatttagtttttatttttattttttatttttataatttttgtatttttagtagagatagggtttcgttatgttgattaggttggtttcgaatttttgattttgggttatttatttatttcggttttttaaagtgttgggattataggcgtgagttattacgtttagtttttttttttttggaaatagagttttattttattattcgggttggagtgtagtggtgtggttttagttt

SEQ ID NO: 219 - DNA, 8440 bp, Artificial Sequence
  chemically treated genomic DNA (Homo sapiens)
agggtgttttgtagagttgttaggagtttttttttttttaatatttttttttgtatttttgttttagtttgttagggttgttaaaatattttagattgggtaattttaaataatagatatttgttgtttatggttttggaggttgggaagtttaagattaaggtgttagtaaatttagtgtttggtgagggtttgttttttattgatggtattttttttttgtgttttgatatgttataagggtaagggagttattttaagttttttttataagggtattgattttatttatgagtggagtttttatgaattaattatttttttaaggttttattttaatattattagattaggtattatattttaatatttgaattttatttatttatttatttatttatttgtttttaaattttttatttttgagatagagtttcgttgtgttattcgggttggagtgtagtggtgcgatttcggtttattgtaagttttgtttttcgggtttatattatttttttgttttatttttttgagtagttgggattataggtgtttattattacgtttggttaatttttttttttttttgtatatttagtagagacggggttttatcgtgttagttaggatggtttcgattttttgatttcgtgatgtatttattttagttttttaaagtgttgggattataggcgtgagttattgcgttcggtttgaattttttttatttttaagaaatagggttttgtttttttgtttagggtggagtgttgtggtatagttatatttattgtatatttaattttttggtttaagtaaattttttattttagttttttaagtagttgggattataggtgtatattattatatttagttaatttttaaaatttttgtagagacgggtttttgttgtgttgtttaggttgtttttaagtttttaggttaaagtgatttttttattttagttttttaaagtgttggaattataggtataagttattatgtatagtttgaattttagggggatattaatatttagattatagtaatttttttttggttttatttttagagaggtttttgttggaggtgataagataattgtttggggtgttttttttgtaattaagattagtagaaaagataggatttgtgttttagggttgttttggtttggttgttaggttttttttatagtgattattgatgttagtgggtaggggaggaattagagttttgattgtttaggtttgggttatatgtttattttagaattagtggtagggttagggattgagagtaggggaatgagtttttgaggaatatttagggttgtgggtatgatagttgaagttatttaggggtttttagttatttgggatttggaagattaaaggtggaatgggttgaggtttaggaagggttttgggatataaatgtttattttatgggtttttttttgagtaggatattggttatcgaagtcgaatgttatttttttgttggagtaagaggtagagttgtgggcggtggagtttagatttttttaaggcgtgtatttaggtgagatgggagtttttcggggtagagagaagtttgtttatgtttgttttttggtttttttttttgtatttgttttttaattttttagagtaaatttattatttagttttagtgaagatttattaagtatttattttgttgtgagtgacgatattacgtttttatttttattgaatttatatttttggtgagggagtgggggaaataaataataaatcggtaaaataataataataaaataagttggatgattatagattgtgatgaatgtcgagaaaatgaaaatgagtaatgaggtagattaggagggggatgagtagattttagtagagagatgagggatagtttttttaaggaggtgatatgtgatttgaagtttgagttatgaggtagtttgagtgaatagtagtattttaggtagaggaaatagtaggtgtaaaggtttgaagttatgtattagttagtttttgtgtaggaaaatattttgattttagtggtttaaattaaataattgtttataatttatgtgtttgtgggttagtggatttaggttgggttttacgttatgtgtttgtagggtgattggtaggtagtagaggtattttagtttattgataggtaattttttattggtattaggtgggaagagtggtttgttattagagtttaggagggatggttagtgtgggaaagggttatagtagggtttttttatattaataatagtttttatttaatatattagttttttattgttttttttgtaattagttataaatgattcgtgaataatatgggtttgaattgtgtgggtttatttatatatggatttttttttgtttgagttatttttgagatagtaagattaatttttttttttattttttagtttatttattgtgaagataatgaggatgaagatttttatggtggtttatttttatttaatgtatagtaaatatatttttttttttttatgatttttttaaatagttttttttttagtttattttaagaatatattatataatatatatataaaatatgtgttaattaagggttgggagtagtggtttatatttataattttagtattttgagaggttatggtaggtggtatttgaggtcgggagtttaagattagtttggttaatatggtgaaatttcgtttttataaaaaaaaaatataaaaaaaaaaaattagttggttatggtggtacgtttttgtagttttagttatttaggaggttgaggtaggagaattgtttgaattaggaggtggaggttgtgatgagttaagattacgttattgtgtttttgtttgggtgatagagtaagattatgttttaaaaaaaataaagtgttaattatttattttattagtatggttaataataagttattaatagttaagtttttggggagttaaaggttatatatagattttcgattgtattggggttagtgtttttagtttttttattgtttaagcgttaataatattatatttcgtagtataaagtaaagtaaattattttaaagttcgggagattagaaatttataatgggtttagttggaatataataaagatgttagtagggtattattttttttggaggttttagggaagggaagaatttatttttttttttttttttagtttttttaagagatggggttttgttattttgtttaggatggagtttagtggtatgattatggtttatagtaattttgattttttgggtttaggtgatttttttgttttagttttttgagtagttgagattataggtgtgtgttattatgtttagttaatttttttttattttttgtagaaataaggttttattattttgtttaggtatgttttgaatttttaggtttaaggagtttttttattttagttgtttaaagtgttgagattataggtatgaggttttgtgtttggttaagaattcgtttttttgtattttttagtttttagaggtatttatattttttggttatggttttgtttatttttatagttagtaaggtttggttaagttatattatatttattttgattttgatttttttgttttttttttttatttaaggattttcgtgattatataggtttatttagataatttagtgtaatttttttattttaatgttagttgattagtaattttaattttttttttttatgtaattggaaatatataggttatagggttaggatgtgggtattttgggaagttattattttgttatttattttggtttaatttttttttttttaattgaattttttattgaaatataataatatggggaaggtgtttatattatatttttaggttattgtggggttagggtaggggtagtatatatttaggttatggttgtgtagagagggttgggtattagggtaaaaagagagttttgttatgaaggaggaggagggaatgtatttgtttatttattaagtatgtatattgagtttttgttgtgggttatagatatagtggtaagtaaggtggacggaaatttttatttttaaggggtttttagttagtgaaatggataaaataaggtagattaaagtattttaatatgttacgggttattttttttttttttagtgatgtatattgtagttatttttgtttgtggggagtagttaggtttttttatatttagagtgaggtggtataatagtatatgttgtcgggaagaagttgggtattagttaattttttttatgtagtacgtttttttttgttgttatttggtattgtggaggttattgtagttggagtttgggtgttatattgttttttttaagtttagtgtttttgtgtgtttgagtgtttttttttgggtattcgttttgtatttttttttgtgttttttttatagattttatttatattttttgtgttaattgttttttttttttttttttttttttttttttattttgtttttttttttttttttttttattttttattttttttttttttattttgtgttttttttttttttttttttggtttgtaaaattatatttttaaatggttaaagttatttgaattttgaacgttttaaaataattagttttattttttttttttttattttattataaatttttttgtcgtggaatagagattaagggatatttttagtttttgttttttttagatttggaaattagatttaaagttaaattgttagttttaaagtaaggtatttttgaagaaatatttaatagtgttattttggtagaaagatttttgtgggatggtttgtggtattgtaggggtgaggatattgagggttattgggaatggagttgtgagagtttagagagtttggtagtgtcggtggtttttacgtttgtgaagacgtttgttttggagtagtggtagaggaatgggtttggggaaaatataagtttgaattttgattttttatattaattaatgatttttgaaagataaagtttttatatatggggaatacgtggaaaaagggagaagttagatttaaatgttttatagaaaatttgtgtaaaagagaaattttataaatgttaggaatgcggaaaggtttttagttatagtttagtatttatcgaatattatcggacgtatataggagagagattttacgaatgttacgaatgtttaaaaggttttcggaatagttcggtatttattaaatattagagaatttatattggggagaaattttataaatgtatttagtgtgggaggatttttaattaaattgttttattgatttagtattagagaatttatataggtgagaagttttatgaatgtagcgaatgtgggaaattttttagttttaggtttttttttagttagtacgagcgaatttatataggcgagaagttttacgagtgtagtgagtgtgggaaagtttttcggtaaagtatttattttatttagtatttgcgaatttatattggggagaaattttattagtgtggtgagtgtggtaaggtttttagttatagtttatttttgattaaatattagcgaatttatataggggagaagttttacgagtgttatgagtgtggaaaagtttttatttagattatattattgatttagtattagaggatttatataggagaaaagttttatgagtgtggtgagtgtgggaaagtttttagttagagtatatttttgatcgagtatcggaggatttatataggagagaagttttatggatgtaacgagtgtgggaaaatttttagttatagttttttatttagttagtatgagcggatatatataggagagaagttttatgagtgtagttagtgtgggaaggtttttcggtagagtatatattttatttaatattagcgaatttatattaggggagaagttttatgaatgtaatgattgcggtaaggtatttagttatagttcgttttttattaaatattagcgaatttatattggggagaagttttacgaatgtaattagtgtggtagagtttttagttagtttgttttttttatttagtattagaggatttatataggagagaaattttatgaatgtaattagtgtggtagagtttttagttagagttttttttttatcgaatattagaggatttatattaaggaaaagtcgtatgggtgtaatgagtgtgggaaattttttagttatagtttttcgtttagttagtacgaaaggacgtatattggggaaaagttttatgagtgttacgattgcggaaagttttttaggtagagtatttattttatttagtatcggaggatttatataggagagaagttatatgtatgtagggattgtggaaaggtttttatttatagttttttttttattaagtattagagaatttatattggataaatttattttatatgtgttggggatataggaagattttaagttatagtttatttttttttagatttgatttaattatatatatgagaaacgtatatttatatataagtttttttatatagtattttttttagatatttttagagagtttatattgatgggaaatgattatgggattattaagttttaggttatttatttttgtatttaaatagtagggaaacgtggagataattaatatttaggatttttagttttgaacgtttattagtgttatgttatagaatttataaaaaagaaatggaataaatgtagtggatttagggaacgtttttgtttaaggatttatcgtattttaaattagagatgtttaaattggtgagaaatttaataaatgttttttatatatacgagaattaaatgaagttagaatttgttattattgtatattatatttttgggggggaaagtgtttatgaatggtgtaggttgattttgatatttatttttaaatgatagtatggtagagtgttttagaaatgagagtggtatttttatggaattattgtggatattgattgttttagtaaatagttgttttgtttgtgtgtatattgtttgattagggtatatggtagttagttatagattggaattatatatgataaagtattagtgtattataaataggtttttagttatttttgtattatttttgtaattaatttttatatgtaatgagattgaaaagttttgtatgggaagatttaaaatgtaaagttgttttcgtagagttttattgattttgagatggtttttgttgttttgttttttttttatatttttttgtagaattcgcgttagaaatatagatatttgttttataaaaagggagattttttttttgttaaattatcgttttataagtaatagtaaatttatgttagaaatttttgttttgtaagatttattttttttgggatatgtttaagttaatttttttaaattgtttttttattgtttttatataatttaatattttgttaaattttaagtttataaatagtagtttttttgataattataatttttaaatggtgatttgttgtttttattagaaattgtattggttggttaggcgcggtgatttatgtttgtaattttagtattttgggaggttaaggtgggaggattatttgaggtcgggagatggaggttgtagtgagttgagatcgtattattgtattttagtttgggtaataagagtgaaattttgttttagaaaaaaaaaaaaaaattgtattggttgtttttggttattagttgttagttgtggttatatttattaatttgatttttttaattttaatgttgggatataaatttttagttatttgaaattttttttttggggagattatgttgtagatagttttttaatattgttttttattatgattgtggagtgttttttgggataaatgtttttgttatttataagttatcggagagttaggtatggttgtatttgtttttagttttagttgtttgggaggttgaggtaggaggattatttgaatttaggagttttgggttgtagtgtgttttattgattgggtgtttatattaagtttggtattaatatgatgattttttgggagtagatgattattagtttgtttatgtaggggtgaattagagtaggttaaaatttttatgttggtagggtttatatttgtaatttcggtattttgggaggttaaggtgggtagattatttgaggttaggagtttaggattagtttggttaatatggtgatatttcgtttttattgaaattataaaattagttgggtacggtggtgtatgtttgtaattttagtaattttggaggttgaggtagtagaattatttgagtttgggaggcggaggttatagtgagtttagattgtgttaa

SEQ ID NO: 220 - DNA, 8440 bp, Artificial Sequence
  chemically treated genomic DNA (Homo sapiens)
ttggtataatttaggtttattgtaattttcgttttttaggtttaagtgattttattgttttagtttttaaaattgttgagattataagtatgtattatcgtgtttagttaattttgtaattttagtagagacggggtgttattatgttggttaggttggttttgaatttttgattttaggtgatttgtttattttggttttttaaagtgtcgggattatagatgtgagttttattagtatgggagttttgatttgttttggtttatttttatataggtaagttggtggttatttgtttttaggaggttattatattgatgttaaatttagtgtggatatttaattagtagagtatattatagtttagaatttttgggtttaagtgatttttttgttttaattttttaagtagttgggattagaggtaggtgtagttatgtttggtttttcggtggtttgtaaatgataaaggtatttattttaagaggtattttataattataatgagaagtaatattggaagattatttgtaatatggtttttttaagagagaaattttaagtaattggaaatttatattttagtattgggattagaaaaattaaattgatggatgtaattataattaatagttaataattaaaaatagttaatgtaatttttttttttttttttgagatagagttttatttttgttgtttaggttggagtgtaatggtacgattttagtttattgtaatttttatttttcgattttaggtgatttttttattttggttttttaaagtgttgggattataggtataagttatcgcgtttggttagttaatgtaatttttaatgagggtagtaagttattatttaaaggttatagttgttagaaagattgttatttgtggatttagggtttaataaaatgttaaattgtatgaaaataatgaaaaagtagtttgagaggattaatttgaatatattttaaaaaagatgaattttgtaaaatagaagtttttaatatgaatttgttattgtttataagacgatggtttaataaaggaaaaatttttttttttgtaaaataaatatttgtgtttttaacgcgagttttgtagagaaatgtagagggagaatagagtagtaaaagttattttagaattagtgagattttacggaagtagttttatattttgagtttttttatataaagttttttaattttattgtatataaagattaattgtaaaaataatgtagggataattaaaaatttgtttatagtatattgatattttgttatatgtaattttaatttgtgattggttgttatgtattttgattaaataatatatatatagataagatagttgtttattgagatagttagtatttatagtgattttataaagatgttatttttatttttggaatattttgttatattgttatttgggaatgaatattagagttaatttgtattatttataagtatttttttttttaaaaatgtgatgtgtaataatggtaaattttgattttatttggttttcgtatatatgaaaggtatttgttgggttttttattaatttgaatatttttggtttggaatacggtgaatttttggataaaagcgttttttggatttattatatttgttttattttttttttgtaggttttataatatagtattaatgggcgtttaaggttgaaggttttgagtgttgattatttttacgtttttttattatttggatgtagagatggatgatttagagtttggtggttttatggttattttttattagtgtgaattttttgagggtgtttgaggggagtgttgtgtgaaaaggtttgtgtatgaatgtacgttttttatgtgtatgattgggttaaatttagaaagggatgagttatggtttaaggtttttttatgtttttagtatatgtggagtgggtttatttagtgtgagttttttggtgtttggtaagggaggagttgtgggtaaaggtttttttatagtttttgtatgtatatggttttttttttgtgtggatttttcggtgttgagtgaggtgggtgttttgtttaaaggatttttcgtaatcgtgatatttatagggtttttttttagtgtgcgttttttcgtgttggttgagcgaggagttgtggttgaaggattttttatatttattgtatttatacggtttttttttggtgtgaattttttggtgttcgatgagaagggagttttggttgaaggttttgttatattggttatatttatagggttttttttttgtgtggattttttgatgttgaatgaggggagtaagttggttgaaggttttgttatattggttgtattcgtagggtttttttttagtgtggattcgttgatgtttggtgagggacgagttgtgattgaatgttttgtcgtagttattgtatttatagggttttttttttggtgtggattcgttggtgttgggtgaggtgtgtgttttgtcggaaggtttttttatattgattgtatttatagggttttttttttgtgtgtgttcgtttatgttggttgagtgaggagttgtggttgaaggtttttttatattcgttgtatttatagggttttttttttgtgtgaatttttcgatgttcggttaggagtgtgttttgattgaaggtttttttatatttattatatttatagggttttttttttgtgtgggttttttggtgttgaattagtggtgtgatttgggtgaaggtttttttatatttatggtattcgtagggttttttttttgtgtggattcgttggtgtttggttaaggatgagttgtggttgaaggttttgttatatttattatattgatagggtttttttttagtgtggattcgtagatgttgggtgaggtggatgttttgtcggaaggtttttttatatttattgtattcgtagggtttttcgtttgtgtgagttcgttcgtgttggttgaaggaggatttaaaattgaaggattttttatattcgttgtatttatagggttttttatttgtgtgagttttttggtgttggattagtggggtaatttggttgaaggtttttttatattgagtgtatttatagggtttttttttagtatggattttttggtgtttggtaagtgtcgagttgtttcggaagttttttaagtattcgtgatattcgtaaggttttttttttgtgtgcgttcggtggtgttcgataagtgttgagttgtgattaaaggttttttcgtatttttgatatttgtagggttttttttttatataggttttttgtaaaatatttaggtttggtttttttttttttttacgtgttttttatgtgtgggggttttgttttttaggagttattggttgatgtgggagattagggtttagatttatgttttttttaaatttatttttttgttattgttttagaataggcgtttttataggcgtgaaggttatcggtattgttaggttttttagatttttataattttatttttagtggtttttagtgtttttatttttgtagtattatagattattttataggaatttttttattaagatgatattgttggatatttttttagagatgttttgttttagaattgatagtttgattttgggtttagtttttaagtttgaaagaagtaaaaattggaaatgttttttaatttttgttttacggtaaaagagtttgtggtgagatgggaagaggaaggataaaattaattattttgaaacgtttaaggtttaagtggttttgattatttaaaaatatagttttgtaaattaggaaaggaagagagggaaatatagaataaggaagaggaaaataaggaataaggaaaggaagaggaaagaatagaataaggaaaggaagaggagagggaggaaaaaatagttggtataaggagtatgaatggagtttgtgaggggagtatagaggaggatgtagagcggatgtttaggagagagtatttagatatatagaggtattggatttggaaggagtagtgtggtatttaggttttagttatagtggtttttataatgttaggtggtaatagagaaaaacgtgttgtatggggaaagttggttgatatttagttttttttcgatagtatatgttgttgtgttattttattttagatgtaaaggaatttaattgttttttataaataggaatagttgtaatgtatattattaagaggaagaaaaatgattcgtggtatattagagtgttttggtttgttttattttgtttattttattaattgggaattttttgagggtaggggttttcgtttattttgtttattattgtatttatagtttatagtaagagtttaatatatatgtttaatgaatgaataaatgtatttttttttttttttttatggtaggattttttttttgttttggtatttagttttttttgtatagttatgatttgggtgtgtgttgtttttattttgattttatagtggtttagaggtgtgatgtgggtattttttttatattgttatgttttagtgaaaagtttaattaaaaaaaaaaaagttaagttagagtgaatggtagaatagtggttttttaagatgtttatattttaattttataatttgtatgtttttaattatatgggagggaggaattaaggttgttaattagttaatattaagatagagaaattatattggattatttgggtggatttgtgtaattacgagggtttttaaatggggaaaaaaggtagaagggttagagttagagtgaatatgatgtgatttgattaggttttgttgattgtgaagatggataaggttatagttaaggaatgtgggtgtttttagaagttgaaaaatgtaaagaaacggatttttagttaggtatagggttttatgtttgtaattttaatattttgggtagttgaggtgggaggattttttgagtttaagagtttaagatatgtttgggtaaaatgatgagattttgtttttataaaaaataaaaaaaaattagttgggtatggtgatatatatttgtagttttagttatttaggaggttgaggtaggaggattatttgagtttagaaggttaaggttgttgtgagttatgattatattattggattttattttaggtaagatagtaagattttattttttaaaaaaattaaaaggagagaaagaaatagattttttttttttttagagtttttagaaggaatgatgttttgttgatatttttattatattttagttagatttattgtggatttttgatttttcgaattttaaaataatttgttttgttttatgttacgaagtgtagtattgttgacgtttgaataatgagggggttaggggtattgattttagtataatcgaaaatttgtgtatagtttttgattttttaaaaatttaattattaatagtttattgttgattatattgataaaataaatagttaatattttgttttttttgaaatatggttttgttttgttatttaggtaggagtatagtggcgtgattttggtttattataatttttattttttagtttaagtagtttttttgttttagttttttgagtagttgggattataggagcgtgttattatggttagttaattttttttttttgtattttttttttgtagagacggggttttattatgttggttaggttggttttgaattttcgattttaaatattatttgttatagttttttaaagtgttgggattataggtgtgagttattgtttttagtttttaattaatatatattttgtatatgtattatataatgtgtttttaaagtaagttaaagaaaaagttatttaaaaaaattataaggaagagaaaatatatttattatgtattaaatggaagtggattattataaagatttttatttttattgtttttatagtgagtaggttgaggagtaggaggaggggttggttttgttgttttaggggtggtttaggtagaagaaaatttatgtataaatggatttatatagtttaaatttatgttatttacgggttatttgtaattggttgtaggaggagtaataggaagttaatatattgggtaagggttgttattgatgtggagggattttattgtgatttttttttatattggttattttttttggattttggtgataggttattttttttatttgatgttaatgggaaattgtttgttagtgggttgggatatttttgttatttattaattattttataggtatatggcgtagggtttagtttggatttattgatttatagatatatgaattataaataattatttggtttaagttattgaggttagagtgtttttttatataaaagttgattgatgtatgattttaggtttttgtatttgttgttttttttgtttgaaatattattgtttatttagattgttttatggtttaggttttaagttatatgttatttttttggagaggttattttttatttttttgttaaagtttatttattttttttttagtttattttattgtttatttttattttttcggtatttattataatttgtaattatttaatttgttttattattattattttatcgatttattgtttgttttttttatttttttattaagaatataaatttagtggagatgaggacgtggtgtcgttatttatagtaaaatgggtgtttggtaaatttttattaagattgagtagtaaatttgttttgaagaattagagagtagatgtagagggagaaattaggaagtaagtatggataggtttttttttgtttcgaagggtttttattttatttgggtatacgttttggggaagtttagattttatcgtttatagttttgttttttgttttagtagggagatgatattcggtttcggtaattaatgttttgtttagggagagatttatagagtgagtatttgtattttaggattttttttgagttttagtttattttatttttggttttttaggttttagatggttggggatttttgagtgattttagttgttatatttatagttttggatgttttttagggatttatttttttatttttagtttttgattttattattggttttggggtggatatgtgatttaagtttggataattagaattttggttttttttttgtttattggtattaatgattattgtgaagaagatttggtagttaaattaggataattttgggatatagattttgttttttttgttggttttggttgtaggaaaggtattttaggtagttgttttgttatttttagtaggagtttttttggaaatgaagttagaaagagattgttatggtttgaatgttggtgtttttttaaaatttaggttatgtatagtggtttatgtttgtaattttagtattttgggaggttgaggtgggaggattattttagtttagaagtttgagggtagtttgggtaatatagtaaggattcgtttttataaaaattttaaaaattagttaggtgtggtggtatgtatttgtagttttagttatttggaagattgaaatggaaggtttatttgagttaggaggttaagtgtgtagtaagtatgattgtgttatagtattttattttgggtaagagaataagattttgttttttaaaaataaaaaaggtttaggtcggacgtagtggtttacgtttgtaattttagtattttgggaggttaaggtgggtgtattacgaggttaggagatcgagattattttggttaatacggtgaaatttcgtttttattaaatatataaaaaaaaaaaaaaattagttaggcgtggtggtgggtatttgtagttttagttatttaggaagatgaggtaggagaatggtgtgaattcgggaggtagagtttgtagtgagtcgagatcgtattattgtattttagttcgggtgatatagcgagattttgttttaaaaataaaaaatttaaaaataaataaataaataaataaataaataaggtttaaatgttagaatgtaatatttaatttgatagtgttgaggtggggttttggggaagtgattaatttatgagggttttatttatgaatgggattagtgtttttataaaagaagtttgagataatttttttgtttttatggtatgttaggatataggaagaaagtgttattagtgaggagtaagtttttattaaatattgaatttgttgatattttgattttaggttttttagtttttagaattatgagtaataaatatttattgtttaaaattatttagtttaaggtattttagtagttttaatagattaagatagaagtgtagagggaggtgttgaagaaggaggggtttttaatagttttatagaatatttt

SEQ ID NO: 221 - DNA, 6076 bp, Artificial Sequence
  chemically treated genomic DNA (Homo sapiens)
aagtagttgggattataggcgtttgttattacgttcggttaattttttgtatttttagtagagacggggttttatcgtgttagttaggattgtttcgattttttgatttcgtgattcgttcgtttcggttttttaaagtgttgggattataggcgtgagttatcgcgttttgcgggtttatgaatttaatagtaaatttagtttaaattgatttaagtcgagagttttttgttggtgaaaatgaaggttttaaaggagagaataatttttaaattgaggaggggatagaagggtattttaaatttttagataaatttttaattttttttgttttattatttgggattgattcgttttggggggttttattttagtagttatagtttggtttttaagtttggaaatattatttattttttgatagagggttttttttgtgaattgtgtatgaagtaggttgtttatttgaattattttaaatgtttgttttattttttttttgatttttttataaaatattgttgtcggttgggcgcggtggtttacgtttgtaattttagtattttgggaggtcgaggcgggcggattacgaagttaggagttcgagattagtttgattaatatggtgaaatttcgtttttattaaaaatataaaaattagtcgggcgtggtggtatacgtttgtaattttagttatttaggaggtcgaggtaggagaatcgtttgaattcgggagatggaggttgtagtgaattgagattgtgttattgaattttagttgggcgatagagcgagatttcgttttaaaaaaaaaaaaatatatatatatatatatatatatatatatatatatatatatatatatatatatttatatatgtgtttgtatatatatatatatatgtgtatatatataaatatatatataagtatatatatatatatatatgtatatatatgtgtatatatatagttgttatataattttagtttttttatgtatttagttttattttgttgttggtttgttgtttttttgagtgaaaatgagtagattgagagataaagtatgaaaaatttttggttattttttattttaaatttataatttttgacgatattaggtttttttttttttttagtgttggtttgattagattttaaggtagataatttttttattttaaattttttttttttatttttattttttttgaaagaagggtttattgagtataggaagataatagtgttagttttggaaagtttgaaatatattttgaaatattagtatttttagggtgggggttaggttgtagtgtaaggaggaaattcggttgtggttagaatttatatttttttttttttttttttttttttttttttttttcgagatagggtgttattttgttatttaggttggagtgtagtgcgttgattatagttaattgtagtttttatttttaaggtttaagtaattttttttatttagtttgttaagtagttgggattatagttgtagggttattaggttgggttaatttttttttttttttttttttttttagagatgaggttttattacgttgtttaagttggttttgaatttttggttttaagtagtttttttttttagtttttttcgagttttgggattgtataggtgtgagttatatgtcgggtttagaattttttatttaagttttatttagttaggtgttaaattttttttttatttcgttttttagaaggcggggttcgtggtattgtttaattaggaggggcgggggggtgtggttgtgtaaattgtttaattaggcgcggttttgggaggaggtcgcgaagttttataaaattgcgaggcgttttttttattcgtttatagtgggtgttaggtttatgttgttttgagaagtattagaggtggtttcgttgtagtttttttttagttgtgatttgtaatgaatacgaaagatataaggagaattatagatattttagaagttaggaaatggtgagtgttggggggatgtttcgagattgtggagtaaggtgttggataggaatttgttgtgacgggatttaggtttgttcggggcgatttcgggatcggtggattggagtttttttagcgtagttatcgcgttcgatttaagagagaatttttaatggttaaattgtatatgtatattttttgatatagagtatttggtgataattattaattgtgaaggttagggagttgttgaagtagaagagagtttatattttattagtttttttttttttttttggagacggagtttcgttttgtcgtttaggttggagtgtagtggcgcgattttaatttattgtaatttttgtttttggggtttaagtaatttttttgttttagtttttcgagtagttgggattataggcgtatattgttacgtttagttaattttttgtattttagtagagatagagttttatcgtgttgtttttgttgtttaggttggagtgtaatggtgtgattttagtttacggtaattttcgttttttaggtttaagcgatttttttgttttagttttttgagtagttgggattataggtacgcgttattacgtttggttaattttgtatttttagagacgaggtttttttatgttggttaggttggtttcgaatttttaattttaggtgattcgttcgtttcgtttttttaaagtgttgagattataggcgtgagttatcgcgttcgatttttattagtggttttatataatagtttgttaatgtcgaaataatagtttgttggtttttttattttattaaaggaataattatttgttagttttaaaatttatttaaaattgttttgaaattttttttttttattttacggtaaatataggaggaaagtagggattttgttggattttttttcgaatattgggattgagggtgtttgtttcgtggaattgaataatgtgggtgaaaagtaggtggaaaatttgtagggggtagtatagtttgaggtcggtgatttatattgagattaatttggagtttgtaaagggagggaaagggagttttttcgattgttttttgggtagtttgtttttttttgtaggtagtttttagttgtttcgaatagttttagttttagttttaggagtgtggattttgagaagttgtagagttttggaaagtaggaattttataggtaaatgtacgtgcgggttttttttttttttgaggttgtatttttagttttttaaggtagtttttcggaaaattttttgttttttgagacggagttttgttttgttatttaggttggagtgtagtggcgcgatttcggtttattggaatttttatttttcgggtttaagcgatttttgtgttttagtttttttagaagttgggattataggcgttcggttaatttttgtaattttagtagagacggggtttcgttattttggttaggttggttttgaatttttgattttaagtgattcgttcgtttcggttttttaaagtgttggggattataggtatgaattattgtgttcggttttgatttttttatgtatagagttgttgtagttaggttgtaatttgtatatatgaagaaaatatgtaaagattatatttagagatttatttaggtagcgttttagagaaatggtttatgagttagagaggttggaattttaaggggtttaaattgattataggtgagagttttttgttggtgtaaattattaaggtattgaaggagggagcgtttttatattgtgatgttgtgataggagggtatgttgagtttttagagttaaatttttaggttttttgttttattattagggtttaatgtattttgtggttttattttagtagttattgatttttaagtttgggaatatgttttattttttgaatttatttttttttttttaaatgttttgaagtgttttgtttatttgagttagtttaaattttcgttttattttttttttgatttttttatagattacggaaatagaatttgtttttttatgtatttaataattttatttatttgttggtagttttttatttttttgggtgaaaatgagtagattgatttgggaggcgaaagtgggaggtttatttgaggttaggagtttaagattagtttggataataaacgaaatttcgtttttataaaaaattaaagaatttgtcgggtttggtggtatgtatttgtagtttttattatttaggggattgaagcggaaggttcgtttgaatttaggagatggaggttgtagtgagttatgattatgttattgtattttaatttgggtggtagagttagattttgttttaaataaataaataaagtaataaataagtaaataaagtaataaataagtaaataaagtaaaaaatagagagagataaagaggtatggtatgagaaagttttgggtacgttttttatatttttattttaaattttcgatttttgggaatattacgtttttttttttgttttagttttgtttggaattttttgcgtatatttgtgattttttatgtaagaggtagatgaagaaatgatttattgagtataggaagtattttttttggtaaattcggattaagttttgttaaaatgtaagtattttttatttttttatttttcgtagattaagtatagtgaaggggacgaggggaagaagtttattttgcgtttgagggttggggttaagattttttattttcgttttatttatttatgttttatattttttgttatttatatttgttaagatgtagggggtagagttcgaagttgtatttaattaggggtatcggggaggagttttgcgatcggtttaattaggcgcgtcgtcggggacgtagttgtagacgtttaattttttcgcgggatttttatttttcgcgtttgtcgtatttggtttcgtttcgttagttttagaggtttagagtggttcgtttggagtttttgtggcgcggttttttgtatttgttttgggattcggagggaggaagttgggatatttcgggagttaggaaatggtgagtgtgtcgggttttgcgtttcgagatagggaggaggggttggttggacgatcggaattggttgtggcgcggttcgggttttttcgtgggcgattttgggtttgcgtatcgagtttttttggcgtagtttagtttttggtattttcggttttagggtggggttgggtcggtagtcgggatttcgggcgttttcgtttcgttttgtgtcgcgattgcggtttcggtttcgaagatttaagtttttttagattgtgcggggtttacgcgagggttatggggtgggggaaattttgatttgtgcgtggaaggagttgtggtgtatgaggtttttagttttttttttttttatagaggatattcgtttttttttgagttttttaagtgtatgggatgtagggttttaaatttttattttgttttttagtttgttgtttttagggtttgtagtaaatttttaaattttttgtttttttttcgtttttttaaacgttaatttttttttttttatttacgatattagtaatcgttttttttatattttatattttagatattgtgtttttattgtttattttttaataaagtaatggattatttttttattaaggtttgttttttgtttatagttttgatatttcgttgtaagaaatttttgtgtttgtttttttgttttttttatgtatagatattttattagaatgtttttgagttgaggtttttttttggaatttttatagggtgatatgtttttagcgtttttttttatttatttttttttggttttgggttttaaaattgtttggggttgatttaagttgtttatagttgttaagttttttggaggatttagtgaatattgggttttgggtgagtttttttagaggatagttgaaatagaaggttgggagaatgttttgggattaggataaatttagtatattttgtttttaaatagttaatttttgggggtatttagtttttttttttttaattttag

SEQ ID NO: 222 - DNA, 6076 bp, Artificial Sequence
  chemically treated genomic DNA (Homo sapiens)
ttggggttgggggaggaaaagttgagtgtttttagaggttggttatttagaagtagggtatgttagatttattttagttttagggtatttttttagttttttattttaattgttttttaggaagatttatttaagatttaatatttattagattttttaagagatttggtagttgtgggtagtttgagttagttttagatagttttgaaatttagaattaggaaaaaataaataggagggggcgttgaaggtatattattttgtaaagattttaaaggggaattttaatttaaagatattttgatgaggtatttgtgtatagaggagataaaaggataagtataaaggttttttatagcggagtgttaaggttatgaatagaaaataaattttgatgaaagagtaatttattgttttgttgaaaaataaataatgaaagtataatatttgaaatgtagaatataggagaaacggttgttaatgtcgtgaatggaaggggagaggttggcgtttggaaaagcgaaaagagaataggaaatttggggatttattgtaagttttggaaatagtaggttgggggatagagtgaggatttgggattttgtattttatatatttagaaaatttagggaaaaacgggtgttttttgtggagagaaaaggaattgggaattttatatattatagttttttttacgtataagttaggattttttttattttatgattttcgcgtgggtttcgtataatttgaagagatttgggttttcggggtcggggtcgtaatcgcggtatagggcgggacgaggacgttcggggtttcggttgtcggtttagttttattttgaggtcgagggtattaagggttgagttgcgttagagggattcggtacgtagatttagagtcgtttacgggaaggttcgggtcgcgttatagttagtttcggtcgtttaattagttttttttttttgtttcgggacgtagggttcgatatatttattattttttgattttcggggtgttttagtttttttttttcggattttaaggtaggtataggaaatcgcgttatagagattttaggcgagttattttgggtttttgggattagcgaagcgaaattaagtacggtagacgcgagaaatgaaaatttcgcgagaaggttgaacgtttgtagttgcgttttcgacggcgcgtttgattggatcgatcgtagagttttttttcggtgtttttgattgggtatagtttcgggttttgttttttgtattttgatagatgtgaatgataggagatgtgaagtatagatgagtgaagcgggaatgaggggttttggttttagtttttaaacgtagggtggatttttttttttcgttttttttattgtatttggtttgcgggggatggggagatgggagatatttgtattttagtagaatttaattcgggtttattaaaggagatattttttgtatttagtgggttatttttttatttattttttgtatgaggagttataggtgtgcgtagggagttttaggtaggattggaatagaagaaagggcgtgatatttttagggatcggaaatttgggatgaggatatgggaagcgtgtttaaggtttttttatattatatttttttatttttttttattttttattttatttatttatttattattttatttatttatttattattttatttatttatttgagatagggtttagttttgttatttaggttagagtgtaatggtatgattatagtttattgtagtttttattttttgggtttaagcgaatttttcgttttagttttttgagtagtagagattataggtatatgttattaagttcggtaaattttttaattttttgtagagacgggatttcgtttgttgtttaggttggttttgaatttttagttttaagtgaattttttattttcgttttttaaattaatttatttatttttatttaagaaaataaaaaattgttaataagtgaataaaattattaaatatatggaaaaataagttttattttcgtaatttgtaaagaaattaaaagggaagtaaagcgaaaatttgaattagtttagataagtagggtattttagaatatttaaaaaggaaaagatgaatttagaaggtagaatatatttttaagtttaagagttagtgattgttgaagtggagttatagagtatattagattttgatgatgaggtaggaaatttaaggatttaattttgggagtttaatatgtttttttgttatagtattataatgtgggaacgtttttttttttaatattttaataatttatattagtagaaaatttttatttgtggttaatttaggttttttgaaattttaatttttttagtttataaattatttttttggaacgttatttaaatgagtttttaaatatgatttttatatattttttttatatatataaattatagtttgattgtagtaattttatatatagaaaaattaaggtcgggtatagtggtttatgtttgtaatttttaatattttgagaggtcgaggcgggcggattatttgaggttaggagtttaaaattagtttggttaagatggcgaaatttcgtttttattaaaattataaaaattagtcgggcgtttataattttagtttttggggaggttgaggtataagaatcgtttgaattcgggaggtagaggttttagtgagtcgagatcgcgttattgtattttagtttgggtgatagagtaagatttcgttttaaaaaataaaaagtttttcggaaaattattttgggaaattagaggtataattttagaaaggagagaaattcgtacgtgtatttgtttgtgaagtttttgttttttagggttttgtagttttttagaatttatatttttggagttggagttggagttgttcggagtagttggagattatttataggggaaggtaggttgtttaggaagtaatcgggggagttttttttttttttttttgtaggttttagattagttttagtgtggattatcggttttaggttatgttgttttttgtaagttttttatttgttttttatttatattgtttagttttacgaggtaaatatttttaattttagtgttcgaaagagaatttagtagagtttttgttttttttttgtgtttatcgtaaagtagaagagaaaaattttaagatagttttaagtggattttaaaattggtaaataattatttttttgataaaatgaagaagttagtaaattattatttcgatattaataaattgttatataaaattattaatgaaggtcgggcgcggtggtttacgtttgtaattttagtattttgggagggcgaggcgggcggattatttaaggttaggagttcgagattagtttgattaatatggagaaatttcgtttttaaaagtataaaattagttaggcgtggtggcgcgtgtttgtaattttagttatttaggaggttgaggtaggagaatcgtttgaatttgggaggcggaagttgtcgtgagttgagattatattattgtattttagtttgggtaataagagtaatacggtgaaattttgtttttattaaaatataaaaaattagttgggcgtggtagtgtgcgtttgtagttttagttattcgggaggttgagataggagaattgtttgaattttagaggtagaggttgtagtgagttgagatcgcgttattgtattttagtttgggcgatagagcgagatttcgtttttaaaaaaaaaaaaaaaaattaatgaaatatggatttttttttgttttagtagttttttgatttttatagttgatggttgttattaggtgttttgtgttaggagatgtatatgtgtagtttagttattgaaaatttttttttaaatcgggcgcggtggttgcgttagggggattttagtttatcggtttcgaagtcgtttcggataggtttgggtttcgttatagtaggtttttgtttagtattttgttttatagtttcgggatatttttttagtatttattattttttggtttttgaggtgtttatggttttttttatgtttttcgtgtttattgtaagttatagttggaaagaagttgtagcgaagttatttttggtgttttttagagtagtatagatttgatatttattgtgggcgggtgaaaggaacgtttcgtagttttatggagtttcgcggtttttttttagagtcgcgtttgattggataatttgtatagttatattttttcgttttttttgattggatagtgttacgggtttcgttttttgggaggcggagtgagaggagaatttaatatttggttgagtggagtttgaatgaaaggttttaggttcgatatgtggtttatatttatataattttaggattcggggagggttggaaaggagaattgtttgaggttaggagtttaagattagtttgagtaacgtagtgagattttatttttaaaaaaaaaagaaaaaaaaaaaaaattagtttagtttggtggttttgtaattatagttttagttatttagtaggttgagtaaagaggattgtttgaattttgaaggtagaggttgtagttagttatgattagcgtattgtattttagtttaggtgatagagtaatattttgtttcgaaaaaaaaaaaaaagaaaagaaaagaaaagaaaaatatagattttagttatagtcggattttttttttgtattgtagtttggtttttattttggggatattggtattttagaatatgttttaggttttttagagttgatattgttgtttttttgtatttagtgggttttttttttaggggaggtgggggtggggggagggggtttgaggtggggaggttgtttgttttgaggtttagttaggttaatattggaagaggagagaggtttgatgtcgttagagattataaatttgggatgagggatagttaaagattttttatattttattttttagtttatttatttttatttaagaaaataataagttaataatagaataaaattaagtgtatggaaaagttggaattatatggtagttatatatatatatatatatatatatatatgtgtatatatatatttatatatgtgtttgtatatatatatatatatgtgtatatatataaatatatatataagtgtgtgtgtgtatatatatatatatatatatatatatatatatatatatatgtttttttttttttgaaacggagtttcgttttgtcgtttagttggagtttagtggtataattttagtttattgtaatttttatttttcgggtttaagcgatttttttgtttcggttttttgagtagttgggattataggcgtgtgttattacgttcggttaatttttgtatttttagtagagacggggttttattatgttggttaggttggtttcgaatttttgatttcgtgattcgttcgtttcggttttttaaagtgttgggattataggcgtgagttatcgcgtttagtcggtagtaatattttataaaggaattaaaagaaaagtaaagtaaatatttgaagtagtttagataagtagtttgttttatgtatagtttataaggaaaattttttgttagaaggtaaatgatatttttaagtttggaagttaaattgtgattgttgaaatggagttttttagggcgggttagttttagatgatgaggtagagaaaattaaggatttatttgggagtttgaaatgtttttttgttttttttttagtttagaaattatttttttttttaagatttttatttttattaataggaagttttcgatttgagttagtttaagttaaatttattgttaaatttataaattcgtagggcgcggtggtttacgtttgtaattttagtattttgggaagtcgaggcggacggattacgaggttaggagatcgagataattttggttaatacggtgaaatttcgtttttattaaaaatataaaaaattagtcgggcgtggtggtaggcgtttgtagttttagttattt

SEQ ID NO: 223 - DNA, 6566 bp, Artificial Sequence
  chemically treated genomic DNA (Homo sapiens)
gtgtttaagtaatttttttgttttagtttttaagtagttgggattataggtaggtgttattacgtttagttaagttttgtatttttagtagagatggggttttattatgttattttggatggttttaaattttttaagttaggtgatttatttgttttggttttttaaagtattgggattttaggtttgaggtattgtatttggttatatattttttatattgtttataaaattgagatttttatagtgatttaggggattttaaaatttattaaggaaaagtgtaataaaatgtaattatatagaaaaaattgtttaaaaatattttaatgcggttttgttagaatatcgttttggattaaatcgatatttattttttttttttttattttatgtgaaggtgatgatttatttttttttaatgttttgttgaaatttgttttttattttagggatattagatttttagggatgtggttatagatttttttttggaggagtggaaatgtttgaattttgtatagagggttttatatagggaagtgatgttggagaattataggaatttggagtttgtgggtgaggaaaatatttttttagatatgaggaatttgtttttgtttattttggttttttttggttttgtatttttttttgtgatgttgttttatatatgttttttatgtatatgttattgttttttatagtgatgatttttatatttgttatggatagttttttagagatttttttatggagtggttttatataaaattagaaaatttatgaagaatattttgattaataagattgaatattattttgttttaggtagagatgtttttggaggttttgagcggaattgttattatggtttaggatatgagatagaaagtattatattgattgataagtgtttttagttgcgtttgtggttttgtgttttttgttttattttgtttttatgagatagagtgttgaataggttggagtgtagtgtcgtgattttagtttattgtaatttttattttttgggtttaagtaatttatatatttgagttttttaatttaattgaaattatagatgtatgttattatatttggttaattttgtattttttttatttttattttatttttattttttttattgattatttttgggtgttttttatagagggggatttggtagggttataggataatagtggagggaaggttagtagataaataagtgaataaaggtttttggtttttttaggtagaggattttgcggtttttcgtagtgtttgtgtttttgggtatttgagattagggagtggtgatgatttttaaggagtatgttgtttttaagtatttgtttaataaagtatattttgtattatttttaatttatttaattttgagtggatatagtatatgttttagagagtatagggttgggggtaaggttatcgataaataggattttaaggtagaagaattttttttagtatagaataaaatgaaaagttttttatgtttatttttttttatatagatattataattattcgattttttaattttttttttattttttttttttttttattttataaaatcgttattgttattatggttcgtttttaatgagttgttgggtatattttttagatagggtggtggttgggtagaggggttttttattttttagtaggcgcggtcgggtagaggcgttttttatttttcggatggggcggttggtttggcggggggttgatttttttatttttttttcggagggagcggttggtcgggtagaggggttttttattttttagtaggggcggttgggtagaggcgttttttatttgttagatggggtggttggtcgggcggggggttgatttttttattttttttcgggacgaggtggttgtcgggaggagacgttttttattttttagacggggtggttgttgggcggaggggttttttattttttagacggggcggttgtcgggcggaggggttttttatttattagacggggtggttgttaggtagagggtttttttattttttagacggggcggtcgggtagagacgttttttatattttagacggggtggtagggtagaggtgttttttatattttagacgatgggcggtcgggtagagacgttttttattttttagattggatagttaggtagaggggttttttatattttagacgatgggcggttaggtagagacgttttttattttttagatggggtggtggtcgggtagaggttgtaatttcggtattttgggaggttaaggtaggcggttgggaggtggaggttgtagcgagtcgagattacgttattgtattttagtttgggtattattgagtattgagtgaacgagatttcgtttgtaatttcggtattttgggaggtcgaggttggcggattattttcggttaggagttggagattagttcggttaatatagcgaattttcgtttttattaaaaaaatacgaaaattagttaggcgtggcggcgcgcgtttgtaattataggtatttagtaggttgaggtaggagaattaggtagggaggttgtagtgagttaagatggtagtagtatcgtttagtttcggttcggtattagagggagattttggaaagagagggagagggagattatggggagagggagagggagaggggattaattttgtatttttattagagatgggatatgattatgttggttaggttggttttgaatttttggttttaagtaattcgtttgttttagtttttatttaggtgttgggattataggtatgagttatcgtatttggttttttgttttgttttttttgttttttgttttttgttttgagatagagttttatttttgttgtttaggttggagtgtaatggtgcgatttcggtttattgtaatttttattttttaggtttaagcgatttttttgttttaatttgtttagtagttgggattataggtatgtgttattaagttcggttatttttgtatttttaatagagatagggtttttttatgttggttaggttggtttcgaattttcgattttaggtgatttgtttattttggttttttaaagtgttgggattataggtatgagttatcgtatttggttcgttttggtttttgaggagtattatagaagtattttttattggtattgtgatagtgtttattatataaattaatgattattttttttaagtagtagttattgttgtagaaattttttttacggaggatattatttaggtttattgttttatatataggaggtttttgattgaattttttttttttggatatggaattttgtttttgttgtttaggttggagtgtaatggtatgatttttatttattgtaattttcgttttttgggtttaagtgatttttttgttttggttttttaagtagttggaattatagtcgtttattattatgtttggtaaatttttgtatttttagtagagataaggtgtttttaaattttgaagattatttttgggacgtttaaaataattgttgttttttgtgtaatatttatatattttaatattaattattatttattatttgtatttttttttttgagatggattattgttttgttatttaggttggagtgtagtggtatgatttcgttttattgtaagttttgtttttagggtttacgttatttttttgttttagttttttaagtagttaggattataggtatttattattatatttggttaatttttttgtatttttagtatagatagggttttattatgttagcgaggatggtttcgagtttttgattttgtgatttatttgtttcgtttttttaaagtgttgggattataggtgtgagttattgtatttggtttattatttgtatttaattggaaatttattggtttttatattttttagatagttttttaaaatttatgatggagtttttattaattgggtacggtaatataggagaagtgatttatatagggacgttgtaaatatatgaaagttattatattggagatttttgttttttagaaattaagaaagatatttattattttgagttttagtggtaagaaatttaaagaaatggttatgaagtatttatgatagaaattaaagagttgataggtagtatagattgacgtgattaaagatatgttggaaataagtttattaaagattagtttggattaagtttttattcgtatttgtttgaattttatatgttttagatttaagggaaaattggtaattaagtggagaagtttattaatgatgtttttttagttttaatattttaaataatttgtaggtttaaaatttatatttttattaagtatgggaagaattttttttattttttattatttatataaatataagaagtatatatgagggaaaaatttttttaatgtaatgagtgtggtaaagtttttaattatagtttatgtttaaggagatattacgtaatttatttaggagagaaatagtataaatgtgatgtatgtggtaaagttttttattagaagtaatattttgtatggtattatagtgtttatattggagaaaaattttataagtgtaatgagtgttttaagatttttaattagaagttatttttttagtgttattatagattttatattgtatagaaatattataaatgtgaagaatgtaataaagtttagagttgaggattataatttgaaatatataggagaatttatattggagaaaaattatataaacgtaaggtttgtgataaggttttttgggataatttatgttttttatgtcgtaagagtttatattggagagaaatgttatatatgtaacgaatgtggtaaggtttttagtagaaaagtaaattttgtatattatggattttatattggagggaaattttataaatgtaagggttgtgataaggttttttattatgatttatgttttgtataatattagagagtttatattggagagaattttatatattttacgagtatggaaagatttttgtttaaaatttagtttttgtaatgtataaggtaatttatattggaaagaaattttatatatgtaatgaatgtggtaaggtttttagtagaaaagtatattttgtatgttattatagattttatattgtttaaggtttttaattaataattaaattttgtataatattagagagtttatattggagagaaattttataagtgtaatgagtggggtaaagttttaagtgggaagtcgttatttttttattattaagtaatttatggtgtagggaaattttgtaaatgtaatgattgttataaagtttttagtaatgttataattattgtaaattattggagaatttataatgaagatagattttataagtgtaataaatgtggtaaaatttttagatatcgattatattttgtagtttattagcgaatttatattggagagaaattttataaatattatgattgtggtaaggtttttagttaagttttattttatgtaaaatataggagaatttatataggagagaaattttataagtgtgatgattgtggtaaagttttgattttacgtttatattttattagatattagagaatttatattggatagaaattttataaatgttttaagtgtggtaaggtttttagtttgtgggtattttatgtagaatattagaaaatttatttttgagataattgttttaaatatagtgattatagaagattataaagttttaattgatattagagttaaataggtattgatttgagattgagttgatttaattttgagtttaagaattaatttatattaaagtgtttatgttaagaagattgggttaggtggggtggtttatgtttgtaattttagtattttgggagtttaaggttgatagattatagttatatttggttatgagagtgtgtaggtggtcgttggggtgggatttgattagaaggggtagggttttgaatagaatttgggcggggtaagaatgaggaggttgtttggaggtcgggttagagggtgatcgttattttgagggtaaggtttggaagtggtgttttgaagggtagggtttcgagggggcgggttttggttttttttttagttggattttaggtgtcgtttgttgttatttttttgttttgtaggattagatttttcgggtattaattggtggatagtttttgatgtgtcgtgatattatttttaatattatagggatgttttttgtttattttagagatttgttttgtcgtttaggttggagggtagtggcgcgatttcggtttattgtaagtttcgtttttcgggtttatgttatttttttgttttagtttttcgagtagttgggattataggcgttcgttattatgtttggttaattttttgtatttttagtagagacggggttttattgtgttagttaggatggtttcgattttttgatttcgtgattcgttcgtttcggttttttaaagtgttggga

SEQ ID NO: 224 - DNA, 6566 bp, Artificial Sequence
  chemically treated genomic DNA (Homo sapiens)
ttttagtattttgggaggtcgaggcgggcggattacgaggttaggagatcgagattattttggttaatatagtgaaatttcgtttttattgaaaatataaaaaattagttaggtatggtggcgggcgtttgtagttttagttattcgggaggttgaggtaggagaatggtatgaattcgggaggcggagtttgtaatgagtcgagatcgcgttattgttttttagtttgggcgatagagtaagtttttaaaatggataggaggtatttttgtgatattaggggtaatattacggtatattagaaattatttattaattagtattcggagaatttagttttgtagggtaagaggatgatagtagacgatatttggggtttagttgaggagaaagttaggattcgttttttcgagattttgttttttaaaatattatttttagattttgtttttaagatgacgattattttttggttcggtttttaggtagtttttttatttttgtttcgtttagattttgtttaaggttttgttttttttaattaggttttattttaacggttatttatatatttttatagttaggtgtggttgtgatttattagttttgggtttttaaagtgttgggattataggtatgagttattttatttggtttaatttttttaatataaatattttaatgtaaattaatttttaaatttaaggttaagttaatttaattttaagttaatgtttatttggttttaatgttaattaaagttttatgattttttatagttattgtatttggaatagttattttaaaaatgaattttttgatgttttgtatggagtgtttatagattgaagattttgttatatttaagatatttgtaagatttttgtttagtatggattttttgatgtttaatgaggtgtgaacgtgaagttaagattttgttataattattatatttgtgaggttttttttttgtatgaatttttttatgttttgtataggatgaagtttgattgaagattttgttatagttatgatatttgtaaggtttttttttagtatgagttcgttgataaattgtaagatatgatcgatgtttgaaaattttattatatttattatatttgtaagatttgtttttattatggattttttagtgatttgtaatggttgtagtattattgaagattttgtgataattattatatttgtaaagtttttttatattatggattgtttgatgataaaaaagtgacgattttttatttaaggttttgttttatttattatatttgtaaggtttttttttagtataaattttttgatgttgtgtaaggtttgattgttgattagaaattttagatagtatgaagtttatgatgatatgtaaggtgtgtttttttattaaaaattttgttatatttattatatgtgtaaggtttttttttagtatgaattgttttatgtattataagggttgaattttgagtaaaggtttttttatattcgtgaaatgtgtaaggttttttttagtatgaattttttgatgttgtgtaaggtataaattatggtggaaaattttgttataatttttatatttgtaagatttttttttagtatgaagtttatgatgtgtaaggtttgtttttttattaaaagttttgttatattcgttatatgtgtaatatttttttttagtatgaatttttacggtatgaaaggtatgaattattttagaaagttttgttataaattttacgtttgtatggtttttttttagtatgaatttttttgtgtgttttaagttgtgatttttaattttaaattttgttgtattttttatatttgtaatgtttttgtatagtatgaagtttatgatgatattgaagggatgatttttgattgaaggttttggaatatttattatatttgtaaggtttttttttagtatgaatattatggtgttatgtaaggtattgtttttgatgaaagattttgttatatatattatatttatattgttttttttttgaatgggttacgtgatgtttttttaaatatgagttatgattaaaggttttgttatatttattatattggaaaggttttttttttatgtgtattttttgtatttgtgtgaataatgaagaatagaggaaattttttttatatttaatagaaatatgggttttgagtttataaattatttgggatgttgaagttgaggaagtattattgatagatttttttatttgattattaatttttttttgggtttgaaatatgtggagtttaggtagatgcgaatgaaagtttgatttaagttgatttttaataggtttgtttttagtatgtttttgattacgttagtttgtattatttgttaattttttggtttttgttatgggtgttttatggttatttttttaaattttttgttattgaaatttaaagtgatgaatattttttttgatttttgggaagtaaaaatttttagtgtgatgatttttatgtatttgtaacgtttttgtgtgaattattttttttgtattatcgtgtttagttgatgagaattttattatggattttaaagagttatttaaaaaatataaagattaataggtttttaattaagtatagatggtaggttaggtgtagtggtttatatttgtagttttagtattttgggaggacgaggtaggtggattataaggttaggagttcgagattattttcgttaatatggtgaaattttatttgtattaaaaatataaaaaaattagttaggtgtagtgataggtgtttatagttttagttatttgggaggttgaggtaggagaatggcgtgaattttggaggtagagtttgtagtgaggcgagattatgttattgtattttagtttgggtgatagagtaataatttattttaaaaaaaaaagtatagatggtaaataatagttaatattgaaatgtgtaaatattatataaaaagtaatagttattttaaacgttttaaaagtgatttttaaagtttaagaatattttatttttattaaaaatataaaaatttgttaggtatggtggtgggcggttgtaattttagttatttgggaaattaaggtaggagaattatttgaatttaggaggcggaggttgtagtgagtggagattatgttattgtattttagtttgggtaataagagtaaaattttatgtttagaaaaaaagagtttagttaagagttttttatatatgaggtagtgagtttgaatgatgtttttcgtaggaggaatttttatagtagtgattgttgtttagagaagatgattattagtttatgtgatgaatattgttatagtgttagtgaaagatgtttttgtgatgttttttaaaaattagaacgggttaggtgcggtggtttatgtttgtaattttagtattttgggaggttaaggtgggtagattatttgaggtcgggagttcgagattagtttgattaatatggagaaattttgtttttattaaaaatatagaaatagtcgggtttggtggtatatgtttgtaattttagttgttaggtaggttgaagtaggagaatcgtttgaatttgggaggtgggggttgtagtgagtcgagatcgtattattgtattttagtttgggtaataagagtgaaattttgttttaaaataaaaaataaaaaataaaaaaaatagaataaaaggttaggtgcggtggtttatgtttataattttaatatttggatggaggttgaggtaggcggattgtttgagattaggagtttaagattagtttggttaatatggttatattttatttttaataaaaatataaaattagttttttttttttttttttttttttatggtttttttttttttttttttttagggtttttttttgatgtcgagtcgaagttggacggtattgttgttattttggtttattgtaatttttttgtttgatttttttgttttagtttgttgagtgtttgtgattgtaggcgcgcgtcgttacgtttgattggttttcgtatttttttggtggagacggggattcgttgtgttggtcgggttggtttttagtttttaatcgggagtgattcgttagtttcggttttttaaggtgtcgggattgtagacggagtttcgtttatttagtgtttaatggtgtttaggttggagtgtagtggcgtgatttcggttcgttataatttttattttttagtcgtttgttttggttttttaaagtgtcgagattgtagtttttgttcggttattattttatttgggaagtgaggagcgtttttgtttggtcgtttatcgtttgggatgtgaggagtttttttgtttggttgtttagtttggaaagtgaggagcgtttttgttcggtcgtttatcgtttgagatgtggggagtatttttgttttgttatttcgtttgggatgtgaggagcgtttttgttcggtcgtttcgtttgagaagtgaggagattttttgtttggtagttatttcgtttgataagtgagaagttttttcgttcggtagtcgtttcgtttgagaagtgagaagttttttcgtttagtagttatttcgtttgggaagtgaggagcgttttttttcggtagttatttcgtttcggagggaggtgggggggttagtttttcgttcggttagttattttatttggtaggtgaggggcgtttttatttagtcgtttttattgggaagtgaggagtttttttgttcggttagtcgtttttttcgggagggaggtgggggggttagtttttcgttaggttagtcgttttattcgggaggtgaggggcgtttttgttcggtcgcgtttattgggaagtgaggagtttttttgtttagttattattttgtttgggaggtgtatttaatagtttattgagaacgggttatgatgataatggcggttttgtagaatagaaaggggggaaaggtggggaaaagattgagaaatcggatggttgtggtgtttgtgtagaaagaggtagatatgggagattttttattttgttttgtattaagaaaaatttttttgttttgggattttgtttatcggtgattttatttttaattttgtgttttttgaaatatgtgttgtatttatttagggttgaatggattaagggtggtgtaagatgtgttttgttaaatagatgtttgaaggtagtatgttttttaagagttattattattttttaattttaggtatttagggatataaatattgcggaaggtcgtagggttttttgtttaggaaaattagagatttttgtttatttgtttatttgttgattttttttttattattgttttgtgattttgttaaatttttttttgtgagaaatatttaagaatgattaataaaaaaaataaaaataaaataaaaataaaaaaaatataaaattagttaggtatggtgatatgtatttgtaattttagttaggttgggaggtttaggtatgtgaattgtttgagtttagaaggtggaggttgtaatgagttgagattacgatattgtattttaatttgtttaatattttgttttataaaaataaaatgaaataaaaaatataaaattataagcgtagttggaaatatttgttagttagtgtgatgttttttattttatattttgggttatggtgataatttcgtttagggtttttaggggtatttttgtttagagtaggatgatgtttaattttattagttaaagtgttttttatgaattttttggttttatgtaaaattattttataagggagtttttaagaagttgtttatgataaatatgagggttattattgtagaaaataatgatatgtatatgaaaagtatgtatggggtaatattataaaagagaatataaaattaggaagagttaagatagataagggtagattttttatgtttggagggatattttttttatttataaattttaggtttttgtagttttttaatattatttttttgtataaagttttttgtgtagggtttaggtatttttatttttttaaagagaaatttatagttatatttttgaaagtttagtgtttttaaaatgaaagatagattttaataaaatattagggaggagtgagttattatttttatatgaaatgagaaaagagaaaataagtatcgatttgatttaagacggtgttttgataaagtcgtattaaggtatttttgaatagttttttttgtatagttgtattttattgtatttttttttgatagattttaaaattttttaagttattgtggaagttttagttttatggataatataaaaaatatatggttaggtgtagtgttttaggtttggaattttagtattttgggaggttaaggtaggtggattatttgatttgaggagtttgagattatttagggtaatatggtgaaattttatttttattaaaagtataaaatttagttgggcgtggtggtatttgtttgtaattttagttatttgaaggttgaggtaggagaattgtttgaatat

SEQ ID NO: 225 - DNA, 5424 bp, Artificial Sequence
  chemically treated genomic DNA (Homo sapiens)
tttagttatttgggaggttgaggtaggagaatcgttgaaatttaggaggaggaggttgtagtgagttgagatcgtattattgtattttagtttgggtaataagagtgaaattttatttaaaaaaagaaaaaaaattagttaggtgtggtggcgtgtgtcggtagttttagttatttgggaatcggaggtatgtaaattatttggatttaggaaggtggaaggtgtagtgaattgagatcgtattattgtattttagtttgagtgatggaatgagattttgtttagagaaataaaattttttaaaaaagtttatagtatatagttttattatatataagggaaaatataagtaatgatttgtgagaatatattgtatttgtaatatatatataaaaggtataaaattttattatgtaaagagtttttataaattaataataaaaatataggatttttaatagaaaagtgatttatagtaaaataatgttttatagtaaaggttatgaaatattattttatagaagatagatattagttaatgattagttttatattattataaaaagtaaattaaaatacgatattattttattttataatatgataaagttaaaatttgataatatgtgttatttttttagttaataaatatttattgagtattaagtagtatagtagttattatgggtatagtgatgaataaaatggtgtttagatttatagtgtttatagtttagtgatgtaattattaatataataattatacgaatgtaagtatataattataaatataattgtaaattaagtaaatgttaaagagagtaagtttagggtgtaattattgggattttattgattataatgggattaaagaatatttttttgagtaagatttgtttgggttgaaatttaaaggatgatttgaaatgaattaatgaggttatggtgtgaagggatagttattttttttttagacggaattaacgtgtttaaagatttttagatacgtgatatttgaggaaataaagtgtagttagagaggaggaaagttatgtaagaaaagtttgaaaagatgggagtaagattttgtagttagtggattatggtaaggatttttgtttttatttaagaataattaaaagttattaagttatgttaagtagaagaatatgagtagaattgttttataaaaattaggttgatttcggtgtgaagaaaagatgtggggaaatgaagtgaaatttttggtaagattttaggttagaaaggatatttggataatattaataaagttaaatatatatatattattttttatatgttttttaattaatttttttttttttcgaatttgtttttttttttgggtttattattttagtgaaataaaatagttatgagatttgggtgagttatttgtagtttaattggaagttgaaatcggaagagtggataggttgtggtataagagtttttaaagaaggaaattttgtgaatatattatttaaataagaaatttagttttttttttttttttatttaattggatgatatttaatttattatttagttttttaattttttttttaaatggtttttttttttttttgagatagagtttagttttgttatttaggttggagtgtaatggtatgatttcggtttattgtaattttcgttttttgagtttaagcgatttttttgttttagttttttgagtagttgggattataggcgcgcgttattacgtttagttgatttttgtatttttagtagagattgggttttattgtgttggttaagttggtttcgaatttttgatttcgtgattcgtttattttagttttttaaagtgttgggattataagcgtgagttattacgtttggttttaaattgttttttaatttattttttttaatttattttttgtaatagtttagattagtttttagaatatttaattattgtttttagtggtttttttttttttagtttattatgaatataggttgtggaatgtaaatatgattacgtatattttttttcgaattttaatgtgtttttttagtttattgagcgatatttaagtttttttataaggattttttttttagttttatgtttttttattaggttagtgaattttttttttttttgtttttttttattttgtataatgggtttttttttttttgttttttttttttataaattgttttttcgatttggaataatatttttttgatttagtgggttgatttttttttaatttcgtattttagtatatagttggtgttttttaagtatagggatgtgattggtttgtttttttaaaattttttttacgtgtttaggatagtgttttatataatgttgggagtagaggcgtttttaggttattgggcgtttagtttttgtaggtgtaatttagcgtttttttttagaaggtttttgggggagggttcgagttggagtatatgaaaaattagggtcgttttagcgtttttttttaggtaatatgagattgtttagagattgttcgaggttgggggaattttagagggagaagttatggttgtgtcggtattaagtagagattgggtcgttttataaggttacgagggattcggagttatattttttgagattattgttttaaggtgatttgggagcgttgtaaggattttggttattatagttatacgaagttaaagtattaggggtgtttgaattagagtaattttattttgttttttattttatttgttgttgttgttttgtttttttttttttttgatatagtttcgttttttcgtttaggttggagtgtaatagcgcgattttagtttattataattttcgttttttaggtttaagtaatttttttgttttagttttcggagtagttgggattataggcgtgtattattacgtttagttagtttttgtatttttagtagagatggggttttattatgtttgttaggttggttttaaatttttgattttgtgattcgttggttatagttttttaaagtgttgggattatatgcgtgagttattacgttcggtttgtattttttttttatttttattttttgagatggagttttattttgtcgtttaggttggagtgtagtagcgttaatttggtttattgtaagttttattttttaggtttaagtgatttttttgttttagttttttaagtagttgggaatataggtatttattattatgtttaggtaatttttgtatttttagtagagacgaggttatattttggtttgttggttaggttgattgtaaatttttgattttaggtgatttgttcgttttagttttttaaagtgttgggattataggtatgagttatagtattcggtaattttattttaaataagaattgggtaaaataaggttgaggtatattgggttgcgttttaagatcgttaggtattttaatttatagtatgagatagtaggttagtatgagatataggttataaagattttgttgataaaagtttatagtaaagaagtcggttaaaatttattaaaattaagatggtaatgagagtgatttttggttgtttttattgttacgttttttattgttagaggcggttgaattagggtaattttattttgagtaggggttggttaaaataaggttgagatttgttgggtagtattttttggaggttaaggtatttatagttataggatgagatatgaggttggtataagatataggttataaagattttgttgataaaataggttgtagtaaagaagtcgattaaaatcgagatagcgatgagaacgatttgattgtttttattgtttattagtggttatggtaacgttaggaagttattttatatggtttaaaaagaggatgtatgaataatttattttttgtttagtatattattaagaaataattataaaaatgcgtaattagtagttttcggggttgttttgtttatggattagttattttttatttttttatttttttaataaatttgtttttattttatggattcgttttaaatttttttttgtgtaagatttaagaatttttttttagagtttgagattcggatttttttttagtagtaaaaggttttagattgaagtattgattttatagtcgttgttaagaattttagttgtttaatagaggcggttttgggtttttgttgggtcgcggtgtgttttgggaagtgtagttatttgagtttttagttttttgtttttgggtcgtgtgtgtacgttagcgaagtattgtgggagtcgtagtaggggaggaaaattttatattttttggcgtgcggcgtaggagtttgggggaatgtagtcgttagagttttgcgttgtttttcggttttgggcgtggttacgatgtattttgggagtcgtagtaggggaagaacgtttttcgtttttttgcgtacggtcgttagaggttttgggaagtgtagttgtttgaagttcgtgttttttgtttttcgatgatgtgcgtttggttttaaagtattttgggagttgtagtggggcggggaaagttatatgttttttcgcgcggggtcgcggttgtttttgggaagtgtggtggtttgagttttacgtttttcgttttttcgttagttgtgcgtttggtcgcgagatattttggtagttataggaatataaaggtttgtgtattttttcgcggggggtcgcggtatttttgggaaatgtagttgtttaggattcgggttttttgtttttcggttttgggcgtgggagtatagtttttatgttttggcgtatcgggtcgcgatggttttgggaattgtagttgtcgtaggttttcgttttttgttttttggcgttttgggtacggtagcgaggcgttttgggagttttagtaggaacgaaaagtttttgcgcgtagggtcgtattggtttttgggaattgtagttttttgaggtcggcggtttggttggggtgacgtcggcgaggtttttgaagacgtaatttttgcgacgttcgcggaggggtttggggggcggcgtcgagcgtttggtttgtgttggttgtaggtaacgaaaggagttttttcggtttgcgtcggatggtttcgggcggtgattcggttcggagttttggaacgttacgtttatttggcggaaagtattacggaaacgtatttttttgtggttattgttaggtgagggggttttggggaggcgcgtcgtggtaggaagagaaagtcggcgttagtggtttaagcgcgattttttagggcgttttgttttttacgtgggaggcgcggagcgggggttacgggaatttttagtgcgggaatttagtgatttgggcgcggtttagttggtttgttcgtttagggtttttttttttttttgttagg

SEQ ID NO: 226 - DNA, 5424 bp, Artificial Sequence
  chemically treated genomic DNA (Homo sapiens)
tttggtagagagagaaaggagttttgagcgaataggttagttaggtcgcgtttaagttattagattttcgtattggggattttcgtggttttcgtttcgcgttttttacgtagagagtagggcgttttgagagatcgcgtttggattattggcgtcggttttttttttttgttacggcgcgtttttttagaatttttttatttaatagtggttatagaaggatgcgttttcgtggtgtttttcgttaggtgggcgtagcgttttagggtttcggatcgagttatcgttcggggttattcggcgtagatcgggagggtttttttcgttgtttatagttaatataggttagacgttcggcgtcgttttttaggttttttcgcgggcgtcgtaggaattgcgtttttagaagtttcgtcgacgttattttaattaggtcgtcggttttaagaaattataatttttagaaattaatgcggttttgcgcgtaagggtttttcgtttttattggaatttttagagcgtttcgttgtcgtgtttagaacgttaggagataaagaacgagggtttgcgataattataatttttagagttatcgcggttcggtgcgttagagtataggggttatatttttacgtttagagtcgagaaataaagaattcgggttttaggtaattatattttttagaaatatcgcggtttttcgcggaagagtatatagatttttgtgtttttataattgttagagtgtttcgcggttaagcgtataattagcggagaaacgaagaacgtggaatttaggttattatattttttagaaataatcgcgatttcgcgcgagagagtatatggtttttttcgttttattgtaatttttagggtgttttgaggttaagcgtatattatcgaaagataaagaatacgagttttaggtaattatattttttagaatttttagcgatcgtgcgtaaaagagcggaggacgttttttttttattacgatttttagagtgtatcgtggttacgtttaaagtcggaagataacgtagagttttggcgattatatttttttaaatttttgcgtcgtacgttagagggtatagggttttttttttttattacgatttttatagtgtttcgttggcgtgtatatacggtttagagataaggaattggagatttaggtgattatattttttagaatatatcgcggtttagtaagagtttaagatcgtttttattaaataattaggatttttaataacgattgtggagttagtattttagtttaagattttttgttattggaaaggggttcggattttagattttaagagagggtttttggattttgtataagaaagaatttgaggcgaatttataaggtgaaagtaagtttattaggaaagtaaaggaataaagaatggttaatttataggtagggtagtttcgagggttgttggttgcgtatttttgtggttattttttgatgatatgttaaataaggggtggattatttatgtattttttttttagattatatagggtaattttttgacgttgttatggttattggtgggtagtgaggataattaggtcgtttttatcgttatttcggttttagtcggtttttttattgtaatttgttttattagtaaggtttttatgatttgtattttgtgttagttttatgttttattttgtgattatgaatgttttaatttttagggaatgttgtttagtaggttttagttttattttaattagtttttatttaagatagagttgttttggtttaatcgtttttgatagtggaagacgtagtaatgaggatagttagaagttatttttattgttattttggttttggtgggttttagtcggtttttttattgtaaatttttattagtaaggtttttatgatttgtgttttatgttgatttgttgttttatattgtgagttagaatgtttaacggttttggaacgtagtttagtatgttttagttttattttatttagtttttatttaagatggagttgtcgggtgttgtggtttatgtttgtaattttagtattttgggaggttaaggcgggtagattatttgaggttaggagtttgtaattagtttggttaataggttagagtgtaatttcgtttttattaaaaatataaaaattatttgggtatggtggtgggtgtttgtatttttagttatttgggaagttgaggtaggagaattatttgaatttgggaggtggagtttgtagtgagttaagttggcgttattgtattttagtttgggcgatagagtgaggttttattttaaaaaataaaaataaaaaaaaaatataggtcgggcgtggtggtttacgtatgtaattttagtattttgggagattgtggttagcgaattataaggttagaagtttgagattagtttgataaatatggtgaaattttatttttattaaaaatataaaaattagttgggcgtggtggtgtacgtttataattttagttatttcggaggttgagataggagaattgtttgaatttgggaggcgaaggttgtagtgagttgagatcgcgttattgtattttagtttgggcgaaagagcgagattgtgttaaaaaaaaaaaagagtaaaataataataataaataaaataaaaaataagatggagttgttttgatttaagtatttttgatgttttggtttcgtataattgtaataattagaatttttgtaacgtttttaggttattttgaaatagtggttttagaggatgtgatttcgagtttttcgtggttttatggagcggtttagtttttatttggtatcggtatagttatggtttttttttttgggatttttttagtttcgagtagtttttgagtagttttatgttatttgagaaggaacgttggagcggttttggttttttatgtgttttagttcgagtttttttttagaagttttttggaaagaggcgttggattgtatttataggggttggacgtttagtgatttgggggcgtttttatttttagtattgtgtggggtattgttttgggtacgtaggagaggttttggggaagtaagttagttatatttttgtgtttgaagagtattaattgtatgttgaaatacgaggttagggaagagttaatttattgaattaaaggagtattgttttagatcgagagaatagtttatgaaaaagagagataaaaaagaaaaagtttattatataaaatggaagagggtaaaaaaagagaaaatttattggtttggtgaaaagatatgagattgaaaaaaaagtttttgtgaaggagtttggatgtcgtttagtaagttaggaagatatattaaaattcgaaggaggatgtgcgtaattatatttgtattttatagtttgtgtttatggtgaattgaagggaagaaggttattaggggtaatagttaaatgttttggaaattaatttgaattgttgtagagaatggattgaggggaatgagttaagaaataatttaaggttaggcgtggtggtttacgtttgtaattttagtattttgggaggttgaggtgggcggattacgaggttaggagttcgagattagtttggttaatatagtgaaatttaatttttattaaaaatataaaaattagttgggcgtggtggcgcgcgtttgtaattttagttatttaggaggttgaggtaggagaatcgtttgaatttaggaggcggaggttgtagtgagtcgagattatattattgtattttagtttgggtgatagagttagattttgttttaaaaaaaaaaaaaaattatttaaagggagaattaaaggattgggtgatgaattggatattatttaattagatggaagggaaggaagagttaagttttttgtttgggtgatatgtttatagaatttttttttttaaagatttttatattatagtttgtttattttttcggttttagtttttagttaggttatagatgatttatttagattttatagttattttgttttattgagatgatgaatttaggaaaagaaataagttcggaagagaagaaaattaattgggggatatgtagagaatgatgtgtgtgtgtttaattttattaatattgtttaaatattttttttaatttggaattttgttaaagattttattttatttttttatattttttttttatatcgaagttagtttgatttttataaagtaattttgtttatatttttttgtttaatataatttgatgatttttaattgtttttaagtaaaggtaaaagtttttattatggtttattggttgtaggattttatttttatttttttaagttttttttatatgattttttttttttttaattgtattttgtttttttaaatgttacgtgtttaaggatttttgagtacgttaatttcgtttgaaaaaaaggtgattatttttttatattataattttattagtttattttaggttattttttagattttagtttaagtaagttttgtttaaagaaatgttttttgattttattataattagtaaggttttagtgattatattttagatttattttttttagtatttatttaatttgtaattatgtttgtaattatgtatttatattcgtgtgattattatgttagtgattatattattagattgtaagtattatgagtttagatattattttgtttattattgtatttataatgattattatgttatttggtgtttagtgaatatttattgattgaaggaatgatatatattattaaattttaattttattatattgtaaggtaaagtgatatcgtgttttaatttattttttatgataatatgaaattgattattgattagtgtttattttttgtgaaataatgttttatagtttttgttatgaaatattattttgttatgaattatttttttattaggagttttatgtttttattattaatttgtagaagttttttgtatagtgggattttatgttttttgtatatatgttgtaagtatagtatatttttataagttattatttatatttttttttgtatatagtgaggttgtgtgttataagtttttttaaaaaattttgtttttttagatagagttttattttattatttaggttggagtgtagtggtgcgattttagtttattgtattttttatttttttaggtttaagtgatttgtatgttttcgatttttaagtagttgagattatcggtatacgttattatatttgattaattttttttttttttttaagtggagttttatttttgttgtttaggttggagtgtaatggtgcgattttagtttattgtaattttttttttttgggttttagcgatttttttgttttagttttttaagtagttaaa

SEQ ID NO: 227 - DNA, 10945 bp, Artificial Sequence
  chemically treated genomic DNA (Homo sapiens)
tattatatatgattgatttttgtagttttggtagagatggggttttgttatgtagtttaggcgggttttgaatttttgagtttaagtaaaaaaattttttaattttatattagtttataaaagtttatattttagatatttgatatgaaataatatgaaataaaaatataaaataggttgggcgtagtggtttacgtttataattttagtattttgggaggttgaggttggaggattattatattaggagattagtattattttggttaatatggtgaaatttcgtttttattaaaaatataaaagttagttgggcgtggtggcgggtgtttgtaattttagttatttaggaggttgaggtaggagaattgtttgaattagggaggaggaggttgtagtgagttaagattatgttattgtattttagtttgggttgtaatttaattaataaataatataaattttattttattattaagatggagaatatgattataattgtgttagttaatatttatgtttattgtgggagataaattagttattgagtagttaattgagtagttagaagttaataatattgtaatttgattttcgaatgtataaagttggtaaacgaagttttttttttatatttattaatatttaagtaagataaaatgaattttaataagaataaataaaaaataattatattgtatttaaagaaagttatgaataaaagataatttgattattatagttattagtattttatttatataatatgtaagataatattttaagttattaaatatttttagatttaatatttaagagtttaaagtgaatatgttaaatatttattgaattaaaaattggtatttttaaaaattagattttaattgaaatataattattaggtcgggtatagtggtttatatttgtaattttagtatttcggaaggttaaggtaggtagattatttgaggttatgagttcgaaattaatttgattaaaatggtgaaatttaatttttattaaatatataaaaattaagcgggcgtggtggtgtgtgtttgtaattttagttatttgagaggttgaggtaggagaattatttgaatttgggaggtagaagttgtagtgagttaagattatattattgtattttagtttgggtaatagagtaagatttttttttaaataaataaataaataaataaaagattatttataaaaatggaagtaaaatttttataaatgtatagagttaaaattagagaaataaatataaatggaattgagagaaattgtttttaaagttggaaatggatttttataatatttttaataaaaaagggtaaattatttttaaaagaaaaatattaatttggttattaataggagttttttaagtgtgtagtttaagaaaaaagaaatatttttgtgtttaaagttaaaaataaaaatgaaagagtaagagatttgatttgggagttgatatgttttttttttaaggttattagtattcggtagttttttaattataaataatattttagagttgataaaatatttgtatattttattttttttttgatttttatatgttgtttggttgtgtaaaatagaggttaaagttttattttgtagatgaaaaagttgaggttcggaaagataaatattatatataaagtttgggttataattggtattagaatataggatttttaaattagtgtttttttattattaaattatttttagggttaagaatatattaagattttaaaagatagagaattgtttaatgtattttattaagattagatttgatttattttagaaagttaagtcgttttggggttttggggtggaaaatttaagaaaaagaatgatgtttatatttatatatttgagttttaatttaaattcggttagttagttatagaattttatttgttgagttttagttttttttgatataaaatggaattatagaaggttttaaaaagattaggataagggtagaattgtattttaaatgtaggagtgtttggtaggtggaaattatttattgatttttagtttaagtatataagtaatatgttgtgttttattgtgttttttttatggtgtttgttttatggttttagattttgggggtttttgattaatttttttgttaagtgatggacgaatagatgaatggatgggtggttgaaagggtggatgaaatgatgtatagatggatgaatgtttaggagggtagaaagaagtaaatatagagttaaaataagaatgaggagatgattgaaggatgaagagttgatgtatgagatagagatatggtttttaatttttttatttttatatagttttattaatatttgttttggggtagtagtggtatatgttttagatgatgtttttagttattatgatatagttgcggaaggtgttatagatttgaggttaattatggtttatgagaaacgtgttaagagttagtagaaaaaatttagtagtataataaagtcgacgttgaaattttttttatttgtaatggttgtttggttaggttatagattatgtatttttggtagagggggtgtatgttatttagtataaatatttagataggtttatagggagggacgaagttttgcgattgttgttaattgaggtttaaagttaaagggagaataagatttttttaggtttagatttagtgtttgggtttataagtttagatggtaagaggtagtatattttagtgaataattgtatttatttatttatttattttttttttttattattttgttttttttgtaggttaagtagttttgtagggtatgtatgaatttgaatgagagagtatgtaggaaagagagaagggaagattattaggattgggttttagttaaggatttgatattattttatttgtttattatagggatgaattaggtggttaagtggtcgtattattttattgtattaatataaatatattttttagttttgggaagtagtatataattgttaagagacgttagaatgttgttggaggattttagggttttatagtttggattttagagttttgaattttagattttttaaggatatgtgtttttttggggtttaggtataatagattatatttatcgatggtgattgtgtgtatgacgttataatatgttatattattaatttatttaagggattttatgaggtaggtattgttatttttattttatagaggatattgagtataggtaagtaatttttttatggttatatagttggaaatagtagagtagttgggatgtgtatttagagtttgtgtatttagttatagtgtaattttgtataattataaaataaatttatgtgtgtgagtatttattcgtttaagtagataagtgttaaattacgcgaatgttgtttaagtattgcgtgagtatatatttttttgaaagcgttttgtttattaatagggttagttagtgatttttttgatcgtttaatgtatttatttagtttttttataggcggtttttggggtttgtcgggggtgttggcgtcgggttggttttggcgttgtttttagtttttattttttaggttttgtagcgttatgaggtcggatttttgggcgtgttttgggttttgatttattcgcgacgttagttgttcgcgttcggagcggatgggtttggttcggttttatttcgcggggtttcgcggtttaacgggtcgtttaggggcgcgggttcggtttcgttttcgacggtgttcgtttcggttttggttaggtcgacggtagtcgggttcgggtggggttcgggttcggggcgcgttttttttatttttttagggttcgcgttttcgttgtcgttaggtttcgtcgagattttcggtggtttcggttttagcggttgtagcgtcgttatcgtcgggtagatttcggtcgattttaaagcgatcgcgcggtggggtcggcggggattggggttgcgtagcgcggtttggggtgggggcggcggggtttttaggagtttttgggaatcgagggttttggggcggtttcgtttcgtatagtttcgggtgagtttggggagggagatatatttttagtttatttcgtttcgttcgatagcgtttcgagttttgagtttttttatttttattttatagatacgaaggtgaagttaaagacgggacgtttattttttgagaatttgttgtttgttgcgtggatattatcgatttattgtttatagcggttagggattcgttttttagatttttaggatcgcgttttcgggggaggagggtgtttttagtaacggtgattcgtattaaagttttttttatcggggttatcgttatagtcggtgcgaggttcgtagggcgttggggatgcgcgatcgattttcgtgaatttgtttttcgcgcgttagggagagttgtgtatttaattaggttttgtgaggacggattgaggtcggtttgtaggttgcggtttcgaaggtaggatttgtggagagatgattcgcgagttttggaggaaggatgggttgtgcgtgcgtgggtgcgtgcgtgtgtgtgtgtgtgtgtttgtgatttttgtatgtttatgtgagattgcgtacgtgcgcgcgtttgtgtgtgcgcgcgcgcgtatatgtttgtgtgtgtgcgtgcgtgtataatttttaaatggacgttattttatatattataaggttaaaaaatgatttttgggttgtgttaggttaagtacgaagagaaagtttcgtttgaaattgtttggaggtttttcggttgttattttcgttatatttcgtggagtatgtggttgtaatttttgttatttaaggtttgatggcggggagattggagtcgtatttaattagcgtattggagtgaaaattgtttaattaggtacgtagttagagaggaggcggtggttttcgggatgtggcgcgggtttttgcgtttggttattatttagatcgcgggttaggggttttatttttttgcgtttttagttgtgggaggttttggtgattcggttatagtttagttttcgtcgttttgtgatttgcgggtattggatgattggtagttaagattttcgaatattttagaagtggggaaatggtgagtgtgcggggtagggcgttttaaggttgaggaggttttatcggagttggcgggaaatggcggcgggatcgagtttgcgaacggagttttcgttgtcgtcgtttagttttgggcgtttagtatttttcggtgagggatttgggtttttgtcggttttcgtatagcgtttttggtttagtttgtagttttttttgtgtagttttggttcgtagtttcgtattttttttaggttgtggggtgaggagtagtttatttggaagtcgttcggcgtggtcggagtggtcggcgtgggaggagttgtgggagaagttgtggtttggggatttcgtttttgttttattttgttcggaatgagatcgaggttttattaaaatagagtttatgtgagtaaatggggatttattaatgggatagcgtcggtcgtggttcgtggtttgggggttgttagcgggttttgaaggaaaagtttttgtgaggtgtgtgaggaagcgaagtaaattattcgttcgttttaatttgtttattagtttttttgttttgtgcgttttttacgcgtggttgtttttgagtggtattttttagaatacgttagtgtggcgtatagttgcgttgagttttgtgagtagttttgttatattattgaatttgaggagggtgtgggtttttggtttgtagataggtgtttagaaatgaagacgggtgtttagaggtagggattggcgtttgtacggggggtagttgcgcggaagagcgttgtagtttgtggaggtttgtgttgatttcgggtggtgtcgttagtgagttgttggatagttcgttgggtcggagtattgattggtgttgagtaaattttttacgttttttgttagaagaaagatatggttgagttgggttggagggagtcgtaggtgttcgcgggagattagtcgggttttgtatatgtattgttttgttgcgtattgttttgtttttttaggttttttttcggggagagagggcgttgagaatttggaggaaaggagttttgagaaatattttttttttgtattttgttgttagtttttatttaatgttaatttatttttgagttcgtttattgggattcgtacggttatatttgttttaggatagggttttattttaggaattgtgtttatggagttttgtttttaggttttttttttaagaatatatatagtgtttagaagatttttggtttattttaattttagatttgtagtaggaatttgttttttttatttatttaggtttttggattatttgattttaattttttttgtttttatgggtttaggaattagttagagtttagttttgtttgggtttgaatttgtagtataaattagttttttcgttaattttgttttgtttttatttaaggtttttgatagtattttttttttgttttttttttttttataaatttttttttttgtgtatatagtttgtttaagtgtattttttatgtgttataagaatttaacgttagtgaggtttaagattatgtttttagatttgtttgttgtaggattaaatataaattagaagaggtttaatgttttttttttagaatgaggaaagaatttttattttttttttttaaagtatttagtttgaaaatttttatatttaaatattttttttgtttttttgaaatatatataatttattttaatttgttaattaggtgatttgttttttttgatttaaaattgtttttaggatatggaaattattgttttgaaatgtgtatagtaagaatatataatttatttcgtaatttttgtagtagagtaggaggttgtttttagtaggtatttgtttttatatattaaatttattttttgttttgaagttgtgggaagtttattttttttttgaatattattaattaggaaattcggatgattttttaaattattaggtgaaagtgtaataaattatgtatgatatatggtattgttaagttttttatttgagagttaattatggtgattttttttgttttggtagttttttagtagattgtttgtaatgtatattatattttgtttaattttttaataatatatttttttgttgttttattattttggatagtattttaggattgtagatgattttgttgttatattttttatacgttgttaagaattattagatgttatatataaagtgtttattaggtttcgttttagagaagaatttttttttttaggattttagttataatttatagttgtgtagtaaagtgtacgaagtgtagtaaagtgttttttaaagttgtaaataaaatgatttttttatttgggatttataattttttttatagtagtttgattagatttttataaaaatgattttttaggatagcgattagtttttttattttttttagtgtgttaatgatttttagatttgatattgatttagaaattatggggtttataaatttagcgaggtttatatatgtgtattgattaaatttgagaatttttatttttttttttttttttttgtttaaatgtttataaatgtgtttattagttttttaagttttaaatgtgtagttttaaattttgagtttatgttttgggatttgagagaagaatagaatttttgtttgagaaatataagtttttttaattacgagattaagtgatgtgttaaaatgagattatagttttatcgtttttttttttgaattgtttgttttttgaagttgtttgttattgttataagtggatataaattaatttaataatgttatattggatattataatttatattttatagtttaataacgtatatagttaattattaattaatgttatttttataaattaataagaatttttgatagttttttattagtttcgtttgtttttttttttgtttttaaaaatatatttgtaattgtttttaattggagtgtatatttagggtagttttatagtttagggttgtaatttttaagttttggtttaaataaattttttttttatattatgtttattttatttttttttttttaggttaaaaaaatattttttttttttttttttttgagatagaatttcgttttgtcgttaggttggggtgtagtggtgcgatttcggtttattgtaattttcgttttttaggtttaagtaatttttttgttttcgagtagttgggattataggcgtacgttattatgttcggcggattttttatattttgtagtagagatggggttttattatattggttaggttggttttgaatttttgattttgtgatttattcgttttagttttttaaagtgttgagattataggcgtgagttatcgtgtttagtttgttttgtgagttttgatgttattatgtgaatggttatttattgatagaagagaagttgttattatttgtattgtgtttattttgttaagaataaatatttagtttttaatataattgttttagagaaatataagggttttggttaaattttttgttattgtatgttatataaaagatagagaagtggttaaaatagattaaaattttataaattttgggaattaaattttttttgggtaggtttagaaaagataaaatcgaaagtatttagtgatatagagagtagaagtttagggtttattttttgttttatttttgtttagatttatttttttttgatttttgtttaggtttgagttaatattgaaattttttatagaattgattaatagaggagattagagtttagggtggttattttagttttttttttagagttggtgtttataattttttgaaatttaaaagttaataaatagggaaaagttatatattttggggttttaaattttttttataaaattaaaattaatgtttttagagatattttatttagtaatttgttttttatttttgtagttttagtggtttttttttataagttttaaagtaaatataaatataaaaataaaaaaatttttttgaattgtatttaatattttttttggtttttttttatttatttatatttagttattattttatatatttttttaaaaagttaggggaaatagaaaggaaatggaaattttggttttgtttttaaatttgggaagtatgggatatttagtgtttattttttaggatgttatgagaattaatatatataatatgagttttttattatagtgttttgtgatatatatttgagtatatattatatgttttataaagatggtattaatgtagatgtatatgttgttttttagatatagatttatttagatattgttatcgtttttaatttttgtaattttatagggtttgtagagaatgttatgtttgaagatgatgattggtggttttgggatgaaaagtatttgtgttgtgataacggtgttggggtaagggattttgtgtgttgtgtttgttttttttaattgagtggtattataatgggtttagagggaggagcgttagtattaataggagatttgttgtaaaaagttaatttatggattttttttaaatttgtagaattttgttatttatagtgaggtttataatattaaataatgtatatgtataatgaagtttgagaggtagtgtttagttaagtgatttttagtttagttttttagtaggattatatggatagtttgaagagaaattattagttgtgttttgtttatagattttgtttattgttttgggtgaaaagtttttatttattttatttttgattgttgttgttttagatttattgaaaataatatagtattatagaaaaaatttaaataggttttcgaggtattttgaaatttattttaattgtaggttgagtgatttgaaggttgaatagattgtcgaagtttaaaagttttagtatttttttagtgttaggatttattttaattattttttgatttaaggttgagattttattttttaaaattagttttttgcgtggttaaaaaagtattaaaaaagttttttgtatgattaaaaaagtattaaaaaagttttttgtatgattaaaaaagtatttaaaaagttttttgtatgattaaaaaagtttttatgttttaaaattagttttttgtatgattttatagtaaggttagggtgaagtatgagggtttttagatattttagtgaaaggtgagtttattttttgttttaggaggttatagggtttattttgtttgattttggtaggggaaggttagtgtagtttattatttttattgtagtaatagaaatttttggaatgttattttttttttgtagagttatagaatattttagagaatattattgcgttgaaagttattttattagataattttagttagttatatgttagaattagcgtttttaatttattttatttgtagttaaattaagaattatgttttttcggttgggcgtagtggtttacgtttgtaattttagtattgtgggaggtcgaggagggcggattataaggttaggagattaagattattttggttaatatggtgaaatttcgtttttattaaaaatataaaaaattagttgggcgtggtggcgggtatatgtagttttagttatttgggaggttgaggtaggagaatggtgtgaatttgggaggcggagtttgtagtgagtcgagattgcgtcgttgtattttagtttgggtgatagagcgagatttcgttttaaaaaaaaaaaaaaaaaaaaaaaagaattatgttttttgatatatttgtatttttagg

SEQ ID NO: 228 - DNA, 10945 bp, Artificial Sequence
  chemically treated genomic DNA (Homo sapiens)
tttgaaaatataaatatattaagggatatagtttttttttttttttttttttttttttgagacggagtttcgttttgttatttaggttggagtgtagcggcgtagtttcggtttattgtaagtttcgttttttaggtttatattatttttttgttttagttttttaagtagttgggattatatgtgttcgttattacgtttagttgattttttgtatttttagtagagacggggttttattatattagttaggatggttttgattttttgattttgtgattcgtttttttcggttttttatagtgttgggattataggcgtgagttattgcgtttagtcgaagggatatagtttttaatttgattataggtgaaatgagttgagagcgttagttttgatatgtgattgattgggattatttgataaaataatttttaacgtagtaatattttttaaagtattttatagttttgtagaaaaaggatggtattttaagagtttttgttgttgtaataaaaataatgggttatattgatttttttttattaaaattaagtagagtaggttttgtgattttttggaataaagggtgaatttattttttattaaagtatttggaagtttttatgttttattttggttttgttgtagaattatgtaaggaattgattttaaaatataaggatttttttaattatgtaaggaattttttaaatatttttttaattatgtaaggaatttttttaatatttttttaattatgtaaggaatttttttaatatttttttaattacgtaaggaattgattttaaaaaataaggttttagttttggattaggagataattgaagtagattttgatattaaggaaatgttgaagtttttggatttcggtagtttgtttaatttttaggttatttagtttatagttgggatgaattttaaaatgtttcggggatttgtttgaattttttttgtagtgttgtattatttttaataaatttgggataataataattaaaaataaaataaataaggattttttatttagaataatggataggatttgtgggtagaatatagttgatggtttttttttaaattgtttatgtgattttattggaagattgggttgagagttatttagttaagtattgttttttaagttttattgtatatatatattatttgatattgtaggttttattgtaagtaataaaattttgtaggtttgaaaagggtttatgaattagttttttatagtaagttttttgttaatgttgacgtttttttttttagatttattatagtattatttagttagagaaagtagatatagtatatagagttttttattttaatatcgttattataatataaatattttttattttaagattattaattattatttttaaatatggtattttttgtagattttataaggttatagaagttggagacggtggtaatgtttgagtaagtttgtatttgaaaaataatatgtgtatttgtattaatgttatttttatggggtatgtaatatgtgtttagatgtatgttatagagtattgtgatgggaagtttatattatgtgtgttaatttttataatattttgggaggtagatattaggtgttttatattttttagatttaaaggtagggttagaatttttattttttttttgttttttttgattttttaaaaaaatgtatagaataatagttaaatataaatagatgggagagagttaaagaaagtgttaagtataatttagaggaatttttttatttttgtgtttgtatttattttgagatttgtaagaaaaagttattgaaattgtagggatagagaataggttgttgggtgggatgtttttagaaatattagttttaattttatagaaaagatttaaggttttaaagtatatagtttttttttatttattggtttttgggttttagaaaattgtgggtattagttttggagaggagattggagtagttattttaaattttgattttttttattaattagttttgtgagagattttagtgttggtttagatttggataaggattagaagagggtagatttgggtagggatgggatagaaagtgggttttaggtttttgttttttatgttattaagtattttcggttttgttttttttaagtttgtttaagagaaatttgatttttagaatttgtgaaattttaatttattttagttatttttttgttttttgtataatatatagtaataaggaatttaattaaaatttttatgtttttttagaataattatattagaagttaaatatttatttttagtaaggtaaatataatataaataataataattttttttttgttaatgaatagttatttatataatggtattaaaatttataaaataggttgggtacggtggtttacgtttgtaattttagtattttgggaggttgaggcgggtggattataaggttaggagtttaagattagtttggttaatatggtgaaattttatttttattataaaatataaaaaattcgtcgggtatggtggcgtgcgtttgtaattttagttattcggaggtaggagaattgtttgaatttgggaggcggaggttgtagtgagtcgagatcgtattattgtattttagtttggcgatagagcgagattttgttttaaaaaaaaaaaaaagaaaaatgtttttttgatttaaaaggaaaaaggtggggtaaatataatataagaagagagtttatttgggttaaagtttgaagattgtaattttggattataaagttgttttgaatatatattttaattagaagtagttataagtatatttttaaaggtaaaaagaaaggtagacggaattgatagaaagttgttagaaatttttattggtttatagaagtaatattggttagtgattggttatgtacgttgttaagttataaggtgtgggttatagtgtttagtatggtattattaggttaatttatatttatttgtggtaatagtaaataattttaaaagataaatagtttaaagaggggaacggtaggattgtggttttattttaatatattatttggtttcgtaattaaaagaatttgtattttttaaataaaagttttgttttttttttaaattttaggatataaatttagaatttggaattgtatatttaagatttggagggttggtaagtatatttgtgggtatttgggtaaggggagaagggagagaatggaagtttttaggtttaattaatgtatatgtgtgaatttcgttggatttatgggttttatgatttttgaattagtgttagatttgaagattattggtatattgaaagaggtggaaaaattgatcgttattttaaaaagttatttttgtagaaatttagttaaattgttatagaagggattgtagattttaaatagagagattattttgtttgtagttttggggagtattttgttgtatttcgtgtattttgttgtataattgtgggttgtgattggaattttgagaaagaaggtttttttttaaaacgaagtttggtgggtattttgtgtataatatttagtaatttttgatagcgtgtggaaaatataatagtaaaattatttataattttaaaatattgtttaaaataatagaatagtaagaaaatgtgttgttagagaattaaataaaatgtggtgtgtattataggtagtttattaagagattgttaaaataaagaaagttattataattagtttttaagtagaagatttgatagtattatgtattatatatagtttattatatttttatttagtaatttgggaggttattcgggttttttaattggtaatatttaaagggaaaataaattttttatagttttaggataggaggtagatttgatatgtgaaggtaggtatttgttgaaggtagttttttattttgttatagaaattgcggaataggttatatatttttgttatgtatattttaaagtaatagtttttatgttttaaagataattttgagttaaaaaagataaattatttagttaatagattaaaatgagttatatatattttaaagaagtagagaaaatatttaaatataaaagtttttaaattaaatgttttaagggagaagagtaaaaattttttttttattttaaagagaaagtattaagttttttttgatttgtatttggttttataataggtaggtttaaaggtatggttttgaattttattaacgttgaatttttgtagtatatgagggatgtatttgagtaaattgtgtgtataggaaagaggatttgtggggaagaaaagagtagaagaaaggtgttattaagagttttgagtgggggtaaggtaggattgacgaaaggattggtttgtgttataagtttaggtttaggtagggttaagttttaattgatttttgagtttataaaggtagaggagattaggattaggtggtttaaaagtttgggtgggtgaagaaaatagatttttgttatagatttggggttaaaatgaattaggagttttttgggtattgtgtgtgtttttgggagaaaaatttaggagtaaagttttatgggtataatttttgaggtagaattttgttttgggataagtgtggtcgtgcgaattttaatgggcgggtttaggagtgggttagtattgggtgggggttggtagtagggtgtagggaagggatgttttttagaattttttttttttaagtttttagcgtttttttttttcgggaggagatttggaggaatagaatagtgcgtagtaggatagtgtatgtgtagaattcggttggtttttcgcggatatttgcgattttttttagtttagtttagttatgttttttttttgataggaaacgtgaggagtttgtttaatattagttaatgtttcgatttaacgggttgtttaataatttattaacgatattattcggagttagtatagatttttataagttgtagcgttttttcgcgtagttgtttttcgtgtagacgttagtttttgtttttggatattcgtttttatttttgaatatttgtttataaattaggggtttatattttttttaagtttaataatatgatagaattatttatagaatttagcgtagttgtgcgttatattagcgtattttaaaagatgttatttaggaatagttacgcgtaggaggcgtatagggtaaggagattggtgggtaagttggagcgggcgggtgatttgtttcgtttttttatatattttataaaagttttttttttaagattcgttggtagtttttaaattacgagttacggtcggcgttgttttattaatgagtttttatttgtttatatgaattttgttttgatggggtttcgattttatttcgaatagggtaaagtagggacgggatttttagattatagttttttttatagttttttttacgtcggttatttcgattacgtcgggcggtttttagataagttattttttattttatagtttggggaaggtgcggggttgcgggttagagttgtataaggagggttgtaggttgggttagaagcgttgtgcggggatcgataggagtttaggttttttatcggagggtattgagcgtttagggttgagcggcggtagcggggatttcgttcgtagattcggtttcgtcgttatttttcgttagtttcgatgagatttttttagttttgggacgttttgtttcgtatatttattatttttttatttttgaagtattcgggagttttagttattaattatttaatattcgtaggttatagagcgacggaggttgagttgtggtcgaattattaaggttttttataattgagaacgtagagagatgaagtttttaattcgcggtttgggtagtagttagacgtaaagattcgcgttatatttcggaagttatcgttttttttttggttgcgtgtttgattgggtagtttttattttagtgcgttgattggatacggttttaattttttcgttattagattttgagtgatagaagttgtaattatatattttacggaatgtggcgagagtgatagtcggggggtttttaggtagttttaggcggggtttttttttcgtgtttggtttggtatagtttaggggttattttttaattttgtgatgtgtaaggtgacgtttatttagaaattatatacgtacgtatatatatagatatatacgcgcgcgcgtatatatagacgcgcgtacgtacgtagttttatataaatatataaaagttatagatatatatatatatatacgtacgtatttacgtacgtatagtttattttttttttaaggttcgcgaattatttttttataaattttgttttcggggtcgtagtttgtaggtcgattttagttcgtttttatagagtttagttgggtgtatagttttttttgacgcgcgaggagtaggtttacgggagtcggtcgcgtatttttagcgttttgcgggtttcgtatcggttgtggcggtgatttcggtgaggagggttttggtgcgggttatcgttgttgaggatatttttttttttcggaagcgcggttttgggggtttggggggcgggtttttgatcgttgtaaataataggtcggtggtgtttacgtagtaggtagtaaatttttaggaagtgagcgtttcgtttttggttttattttcgtgtttgtagaatgggggtgaggggatttaggattcggagcgttgtcgggcggggcgaggtgggttgagagtgtgtttttttttttaagtttattcggagttgtgcggggcgggatcgttttaggattttcggtttttaggagtttttgggggtttcgtcgtttttattttaggtcgcgttgcgtagttttagttttcgtcggttttatcgcgcggtcgttttgaggtcggtcggggtttgttcggcgatggcgacgttgtagtcgttggagtcggggttatcggggatttcggcgggatttggcggtagcgaggacgcggattttggagagatgggaggggcgcgtttcgagttcgagttttattcggattcggttgtcgtcggtttagttagggtcggggcggatatcgtcgaggacgaagtcgggttcgcgtttttgggcgattcgttgagtcgcggagtttcgcggggtggagtcgggttaggtttattcgtttcgggcgcgggtagttggcgtcgcgggtgggttagaatttaggatacgtttaggagttcgattttatggcgttgtagggtttggggagtgggggttggggatagcgttagggttaattcgacgttagtattttcggtagattttaggagtcgtttgtgaagagattggataggtgtattaagcgattagaaaagttattggttggttttgttgatgagtagaacgtttttagagaagtgtatgtttacgtagtgtttggatagtattcgcgtagtttgatatttgtttgtttgggcggatagatgtttatatatataagtttgttttgtagttatgtaggattgtattgtggttaagtatatagattttgggtgtatattttagttgttttgttatttttagttgtgtgattatggggaagttatttgtttgtgtttagtgttttttgtaaagtgaagatagtagtatttgttttatggagttttttaagtgagttaatagtgtaatatgttatggcgttatgtatatagttattatcggtaaatatagtttattatgtttgaattttagaggagtatatgtttttgaaaagtttaaaatttaggattttaaaatttagattgtgagattttggaattttttagtagtattttaacgttttttggtaattgtatgttgttttttagggttggaaggtgtatttgtattaatatagtgaaataatacggttatttgattatttagtttatttttatagtaggtaaataaggtgatgttaaatttttggttggggtttagttttggtaattttttttttttttttttttgtatatttttttatttagatttatatatgttttgtaggattgtttagtttgtagagaaggtaggatggtgaggagagaaggtgagtgggtgggtgggtgtaattgtttattgaagtgtgttgttttttgttatttgaatttgtgggtttaggtattgggtttggatttgagggggttttgttttttttttaattttaagttttaattggtagtaatcgtagagtttcgtttttttttgtgagtttgtttgggtgtttatgttggatgatatgtattttttttgttaggagtgtatagtttatggtttggttaggtagttattgtagatgagaagagttttaacgtcgattttattgtgttgttgggttttttttgttggtttttagtacgttttttatgagttatgattagttttaggtttatggtatttttcgtagttatgttatggtgattggggatattatttgaagtatgtgttattgttattttaaggtaggtgttggtgaggttgtgtggggataggagggttggagattatgtttttattttatgtattaattttttattttttaattatttttttatttttattttgattttgtgtttatttttttttgtttttttgagtatttatttatttatgtattattttatttatttttttaattatttatttatttatttattcgtttattatttagtagaaggattgattagaagtttttaggatttggagttatgaaatagatattatggaggagatatagtgaaatataatatattatttatgtgtttaaattaaaagttagtgagtggtttttatttgttaggtatttttgtatttagagtgtagttttgtttttattttgatttttttggagttttttgtagttttattttatattagaaaaagttgaggtttagtaaatgaggttttataattgattggtcgagtttggattggagtttagatgtgtgaatgtaggtattatttttttttttgagttttttattttagggttttagagcggtttagttttttggggtgggttaggtttaattttggtggaatgtattgagtaattttttattttttggagttttaatgtatttttagttttaggagtggtttagtgatgggaaagtattggtttgagagttttgtgttttaatgttagttgtgatttaaattttgtgtgtgatgtttgttttttcgagttttagtttttttatttgtaaaatgggattttagtttttattttgtatagttaaatagtatataaagattagagaagagatgggatatataaatattttgttaattttagaatgttgtttgtagttgaaaggttgtcgggtattgataattttgagaaaagaatatgttagtttttaagttaagttttttatttttttatttttatttttaattttagatataaaaatgtttttttttttttgaattatatatttaagaagtttttattgataattaaattaatgttttttttttgaaaataatttatttttttttgttgaaggtattgtaagaatttatttttagttttaaggataattttttttagttttatttatatttatttttttggttttagttttatatatttgtggaaattttatttttatttttgtgaataattttttgtttgtttgtttgtttgtttgagagggagttttgttttgttgtttagattggagtgtaatggtgtgattttggtttattgtagtttttgttttttaggtttaagtgatttttttgttttagttttttaagtagttgggattataggtatatattattacgttcgtttaatttttgtatgtttagtggagattgggttttattattttggttagattggtttcgaatttatgattttaggtgatttgtttgttttggtttttcgaagtgttggaattataggtgtgagttattgtgttcggtttaataattatattttaattaaaatttaatttttaaaggtattagtttttaatttaataaatatttaatatatttattttaaatttttaggtgttaagtttaaaaatgtttaatggtttaaaatattgttttatatattgtatgaatgaaatattaatgattgtgatggttagattattttttgtttatagttttttttaaatataatataattattttttatttgtttttattaaaatttattttgttttatttaaatgttgataaatatagaagggaggtttcgtttgttagttttatatattcgaaagttaaattgtaatgttattaatttttaattatttagttaattatttagtaattaatttgttttttatagtaaatataagtattaattaatataattatagttatattttttattttaataatggagtaaaatttgtgttatttattgattaagttatagtttaggttggagtgtagtggtatgattttggtttattgtaatttttttttttttggtttaagtaatttttttgttttagttttttgagtagttgggattataggtattcgttattacgtttaattaatttttgtatttttagtagagacggggttttattatattggttaggatggtattgattttttgatatggtgattttttagttttagttttttaaagtgttaggattataggcgtgagttattgcgtttagtttattttatatttttattttatattattttatgttaagtatttaggatataaatttttgtaaattagtataaaattaaaaaatttttttgtttgagtttaggagtttaagattcgtttgggttatatggtaagattttatttttattaaaattataaaagttagttatatgtggtg

SEQ ID NO: 229 - DNA, 5304 bp, Artificial Sequence
  chemically treated genomic DNA (Homo sapiens)
aattttgtttttattaaaaatataataattagttgggcgtggtggcgggtatttgtagttttatttacgtaggaggttgaggtgggagaatggcgtgaattcgggaggcggagtttgtagtgagttaagatcgcgttattgtattttagtttgggtgatagagcgagattttgttttaaaaaaaaaaaaattagttaggcgtggtggtaggcgtttgtgattttagttatttaggaggttgaggtagaagtattgtttgaatttagaggtagaggttgtagtgagttagggattacgttattgtattttagaatgggtgataagagcgagattttattttaaaaaaaaaaaaaaaaaaaaaaaaaggaaaagaaaaattaaaattaaaattgtgtattttatatgaatagtaatattatttgttaagtagtaatagtattttaatttatattgattaaaattttttaggattatgaatataaagttaaaattttttttaaaagttttttttttttttgtattatttttaaatattttaatttatataagtagagagtgtttatttaaataaatgtttatgttttaatagtgttaatttaaggggaattattatgaattaagtttgtggtagataatgtttaagtgtgttttatttagatttttattgatttatttttatatttttttttttatatttttatattaatttatgtttttgatagttagtattaagggtttttttttataggattgtttttaagttattagagatattttgtttgtaattttagagttataaataaggtcgggcgttatagtagagaagtttagtttttttgatttggattaaaataattttatggtggaagttatataatagatttttgtaatattaggatgaagattaatttttatgtttttgtgtgatttttttaggattatatttatgttttgttttttgtttttaattatattgttttttttattttttttattattttttttgggagtatttttttagtaatttatatgtatattaatttttattttagattttgtttttggggaatataatttataatagttggtattaaaagtgggtttaggaagtatattttaaggataggattttggaattggatttttgtttggtaatggtaatagaaattttgttgttgatagtaatatttttgatattttatagtgttataattgttaagatttttatttatggtgaattaggatgaaataaggtagagaaggatagggtttacgtagtatttttagtattttagaaatgtggtagaatgattatataatagatcgtattggggtaatggaaatgttttgaaattagataatgatgacgtaatataattaaaaaaatttattaaaaattattgatttatatatttttaaaatgggttaattatatggtatgtaaattgtagtttaataaagttgtttttaaaatgtcgtaaattattttattttttatatttaagtttttaattaataaatttagtttatttttttattttttaatggggttagttttgtgattttttttttttaaaataatgtgatagaagttaatagtgtgtgagttttgattttaagtttaaaggtgttttgtaggtttttatttatttttttggaattttgttattgttatgtgaataattttaggttagtttgttaatagtggaagatatatggtttaattacgtttattatttaatggttagttatatgagtgaggttattttagattagttaaattttagttaaattatttattgattatagaggcgtaataaaattagaatttaggtattatgagttaaattgggtttagataaatagaattatttaggtgattataaatttataagtaaaaatgaatagttattattttaagttattaaattttggagtggtttggatatagtaatagataagatgtaggtgatattaggtaaataattattaaaaagattatggaattgattggttgatgttgagtatttatgtgtttaagagagaagataggtttagttgagttaattattaatttaaaggataaagataatgtgtagagttatttataggagagttgtagtttagattttgtaaagtaagattatgttgtttgtagttaaaaattatattttatttgtaaagtatggtatattatttttggtatattattaagttttggaagagatagagtatttgattgatggttattaagggattgtgtaattagagttaattattaggagttaagtgttattatatttatgaagtgataagattaggagagtataatagtaatttattataaaatggaagtaggtatattggaattgggtttaagtaagaaagagatgataagaataagcgttaggggtattttttatattaagttgaaacgaggaataaatttgggtttgattaatggataggttattttggtatattggtataaattgtaaataaattattgttgtattatagttttattagggattgttttgaaagatagttgtgaggggaaattttttattgtgtagagtttggagggatgtattttattatttattttgtatggagagagaagtgggttatggatttttgggttgtggtaaatgatttggataaataggggtttggaacgagtaagtttggaagattggaaagaaatgatttatggaagaggtatatggatagatttatgggagtatgtataaagagtgatttgttttatatgttaatgtttattagagaataatattaaagagatattaaataattagtaggataatttgtttagtgtatgttagttagtttttgtttttagatatttcgttatttttataaagggattatgaataacgtaatagttatggtggtagatagaagttataaaaaatgggtttttttttattaaggtttatttattgtggttgttgaatgtttagttggttaatagtaaagattgagattttgatttaagggtattttttgagaaaattagttatttggtagtatattgattatgttagattttttttatattcgtattaaagcgggtttcggcgttattttagtcgcggcgattatagagatgcgggtttcgcggttttgggtttggaggtgagtgagcggttcggggcggaattgggaagggaatgcgggtggagcgagttggagtaaagtttttcgagtttcgggattagggtgggtttgggcgtatgggaattttcggaaggaggtattgaagggagtatttagacgagttgggtttcggcgttgtagtcgcgttacggttttggatttcgttcggtatttgttgtttttaggataaaattatgacgatgttttattttaagttttttaggttataaatcgtttttttagttcgttggtttttatgatttagtttttgttcgacgatgtggatattgttattatttttattttatagataggaaagttgaggtttagagaagcgaacgatgtgtttgtttaagattacgcggtgagttagagttagacgaggtgggaattgggtcgttaggcggggttcgttgtttttttaggttttttttttgttttagtttgtttttttttttttttagtttttttgttcggaagataagcgtattttttttttgtgtttatttgttttttattttagtttgttttttcgtaggtgaaggtttttaattttgacggtttagcgttttttttggtttttttcggaggttatgtatggttaagtttgaagattttttagaatagcgataatatttagtaagtggaggttgtagtttttagagaatttttttgattacgggagtgtattttttagttattttgtgaatttttgtgatttgttgttttgagtttatgggattttggaaatagggattattagattgtaggattttggtttttgtttgttttttttttgagacggagtttcgtttttgttgtttaagttggggtgtaatggtgcgatttcggtttattgtaattttcgtttttcgggttttagcgatttttttgttttagtttttcgagtagttgggattataggcgtgtgttattatattttgttgattttttgtattgttagtagaaatagggttttataatgttcgttaggttggtttcgaatttttaattttaggtgataggtacgtcgtgggtatttaaagtaagagggattatagggtttgaggtagggggggcgggattaggatttgttgttgggtgtcgaataggggtgttgaggggggcggggtggtgggagggagaggggaggagaggggaggagttggtagtggttttgggaagagcgtgagtaggggagtggtgtgagaggggtagaggggggaggagaggggggagagaggaggatgaggggaaagaattttaaaatatttatgtatggaaggttatagataaagttttttcgttttcggttttttcgcgatatttaggaatttttttttgaatttcgtttatattttagttcgcgtttttagttatatggtttggggtaattcgttatttagtttttttatcgtcgtgattttttggtttttcgtttcgatggttttatcgcgtttgtattttggggaagttgcgttcggtttcgtttcgggtttttttatttatttttcgttatatttatagagaagtttacgttattttattttagagttttcgatggtgttttttcggttttagggttggagtgggggtggagggcgggaaaaattatagagataaaatatagagtatttcggtagtcggtaagaggaagagagagtggtttttatatttttaatattttagaggcggttgagtcggaggcggtcgtataaagcgggtttcgggggtcgttttagtcgcggtcgattatagagatgcggttttcgtcggttttgggtttggaggtgagtgagcggttgcggggcggaattgggaagggaatgcgggtggagcgagttggaggtaaagtttttcgagtttcgggattagggtgggtttgggcgttgggaattttcggaaggaggtattgaagggagtatttagacgagttgggtttcggcgttgtagtcgcgttacggttttggatttcgttcgggtatttgttgtttttaggataaaattatgacgatgttttattttaagttttttaggttataaatcgtttttttagttcgttggtttttatgatttagtttttgttcgacgatgtggatattgttattatttttattttataga

SEQ ID NO: 230 - DNA, 5304 bp, Artificial Sequence
  chemically treated genomic DNA (Homo sapiens)
tttgtaaaatggaggtgatgatagtgtttatatcgtcgggtaggagttggattataagagttagcgaattggaaaggcggtttgtaatttggaaggtttgggatggagtatcgttatgattttgttttgagagtagtaggtattcgggcggggtttagaatcgtgacgcgattgtagcgtcggggtttagttcgtttgggtgttttttttagtattttttttcgagagtttttagcgtttaggtttattttgatttcggggttcgaaaaattttgtttttagttcgttttattcgtattttttttttagtttcgtttcgtagtcgtttatttatttttagatttagagtcggcgggagtcgtatttttatggtcggtcgcggttggaacggttttcggggttcgttttgtgcgatcgttttcggtttagtcgtttttaggatattggggatgtggaagttatttttttttttttttgtcggttgtcggggtattttatgttttgtttttgtggtttttttcgttttttatttttattttagttttgaagtcggagaagtattatcgagagttttggggtagagtggcgtgggtttttttgtgggtgtggcgggaagtagatgaaaggattcggggcggggtcgaacgtagtttttttaaggtgtaggcgcggtgaaattatcgagacggagggttagagagttacggcggtgagagggttgagtgacgggttattttaaattatgtggttggaggcgcgagttggggtgtgggcgaggtttaggagggggtttttgggtgtcgcggaggggtcggggacgggagagttttgtttgtggttttttatgtataggtgttttggaattttttttttttattttttttttttttttttttttttttttttttattttttttatattatttttttatttacgttttttttagaattattattaatttttttttttttttttttttttttttttattatttcgttttttttaatatttttattcgatatttagtagtagattttggtttcgttttttttgttttaggttttgtaattttttttattttgggtgtttacggcgtgtttattatttgaggttagaagttcgagattagtttggcgaatattgtgaaattttgtttttattaataatataaaaaattagtagggtgtggtggtatacgtttgtaattttagttattcgggaggttgaggtaggagaatcgttggaattcgggaggcggaggttgtagtgagtcgagatcgtattattgtattttagtttgggtaataagagcgaaatttcgttttaaaaaaaaaataaataaaaattaagattttgtaatttgatagtttttatttttagaattttatggatttaaaataatagattatagggatttataaggtggttggaaagtgtattttcgtggttagagggattttttggaaattgtagtttttatttattgaatattatcgttgttttggggaatttttaagtttgattatatatggttttcggggggagttaaggaggacgttgagtcgttaagattaagaatttttatttgcgggagggtaggttgaggtaggagataggtgggtatagagaagaaatacgtttatttttcgggtaggagggttgaggaagagaaaggatagattaaggtagagagaaggtttggagaaataacgggtttcgtttagcgatttagtttttatttcgtttggttttgatttatcgcgtggttttggatagatatatcgttcgtttttttgggttttagtttttttatttgtaaaatggaggtgatgatagtgtttatatcgtcgggtaggagttggattataagagttagcgaattggaaaggcggtttgtaatttggaaggtttgggatggagtatcgttatgattttgttttgagagtagtaggtatcgggcggggtttagaatcgtgacgcgattgtagcgtcggggtttagttcgtttgggtgttttttttagtattttttttcgagagtttttatgcgtttaggtttattttgatttcggggttcgaaaaattttgttttagttcgttttattcgtattttttttttagtttcgtttcgagtcgtttatttatttttagatttagagtcgcgggattcgtatttttatggtcgtcgcggttgagatagcgtcggggttcgttttggtgcgagtgtggaaaaaatttgatataattaatatgttattaaatgattggtttttttaagggatgtttttggattagggttttagtttttgttgttaattaattggatatttagtagttatagtagataaattttggtgaaggggaatttattttttatagtttttatttgttattatggttgttacgttatttatggtttttttgtggaaataacggaatgtttaaggatagaggttggttgatatgtattggataagttattttgttgattgtttagtgtttttttagtgttgttttttggtgagtattaatatgtaaaatagattattttttgtatatatttttataagtttgtttatatgttttttttataaattatttttttttaattttttaggtttgttcgttttaagtttttatttatttaaattatttgttataatttaggagtttatgatttatttttttttttatataaagtagatgatgagatgtatttttttaagttttgtataatggaggatttttttttataattgttttttaaggtagtttttagtgggattatagtgtaatagtagtttatttgtagtttgtattaatgtattaagatgatttatttattaattaggtttaggtttatttttcgttttagtttgatgtaggaaatgtttttaacgtttgtttttgttattttttttttatttgggtttaattttaatatatttgtttttattttatgatgaattgttgttgtatttttttggttttattattttatgggtgtgatagtatttagtttttgatggttagttttggttgtatagttttttgatgattattagttagatgttttgttttttttagggtttaataatatgttaagagtagtatgttatattttatagatgaggtataatttttggttgtagatagtatggttttgttttataaggtttgggttgtaatttttttgtgggtgattttatatattgtttttgttttttaagttggtaattggtttaattgagtttgtttttttttttgaatatataaatatttagtattaattagttaattttatagtttttttgatgattatttatttgatattatttatattttatttgttgttgtatttaaattattttaaaatttagtgatttgaaatagtaattatttatttttgtttatgaatttatggttatttgggtggttttgtttatttgggtttagtttggtttatagtatttggattttaattttgttacgtttttgtagttagtagatggtttggttagagtttgattggtttaggatggttttatttatataattggttattgagtggtgggcgtgattgggttatgtgttttttattgttaataggttagtttgggattatttatatagtagtggtagggttttaagagagtgagtggaaatttgtagggtatttttagatttagggttagaatttatatattgttaatttttgttatattgttttgggaaaaggaaattataggattagttttattaagggatgaagaaatagattgaatttattgattagaagtttgaatatagggagtgaaataatttgcgatattttaaaaataattttattaagttataatttatatattatgtaattgatttattttaagggtatataagttaatgatttttagtaaatttttttagttatattacgttattattatttagttttagaatatttttattattttaatacgatttattgtgtaattattttattatatttttaaaatattggagatattgcgtgagttttatttttttttattttattttattttaatttattataggtgaaaattttagtaattgtaatattataagatgttagaggtattattattagtaatagaatttttgttgttattgttaaataagggtttaattttagaattttatttttagagtgtgttttttaggtttatttttagtattagttgttgtagattatgttttttagaagtagaatttgaaatggagattagtgtgtatgtgaattattaaggaagtatttttagagaagatagtgaagggagtaaggaaagtaatatagttaagggtaggaaataaagtatggatgtgattttggagaagttatataaggatatgaaggttagtttttattttgatattatagaaatttgttatgtagtttttattataaagttgttttaatttaaattaggagagttgggtttttttattgtagcgttcggttttgtttgtgattttgagattataggtaaagtatttttagtaatttgagggtagttttgtgaagaagagtttttggtattggttattaaaaatataagttggtgtgaagatatggaagagagaatataaaaatgagttagtgggaatttaggtggggtatatttaggtattgtttgttataggtttagtttatgatggttttttttaaattagtattgttaaagtatgaatatttatttgaatggatattttttatttatatgggttgaggtatttgaaaataatataggggagaaaagggtttttaaaagaaattttaattttgtatttatgattttaaagaattttaattaatataaattaaaatgttgttgttgtttagtaaatagtattgttatttatgtggaatatatagttttgattttgatttttttttttttttttttttttttttttttttttttgagatgaagtttcgtttttgttatttattttggagtgtaatggcgtgatttttggtttattgtaatttttgtttttgggtttaagtaatatttttgttttagttttttgaatagttgggattatagacgtttgttattacgtttggttaatttttttttttttgagatagagtttcgttttgttatttaggttggagtgtagtggcgcgattttggtttattgtaagtttcgtttttcgggtttacgttatttttttattttagttttttgcgtagatgggattataggtgttcgttattacgtttagttaattattgtatttttagtagagatagggtt

SEQ ID NO: 231 - DNA, 6363 bp, Artificial Sequence
  chemically treated genomic DNA (Homo sapiens)
ttttttttgagatggagttttgtttttgttgtttaggttggagtgtaatgatgtgatttcggtttattgtaatttacgtttttcggatttaagcgatttttttgttttagtttttttagtagttgggattataggcgtttgttattacgtttggttaatttttgtatttttagtagtgattgggttttattatgttggttagggtggtttcgaatttttgattttaggtgatttatttattttagttttttaaagtgttgggattatagatgtgagttattattttcggtataattttttttttttttttatttttcgtagagatagggttttattgtgttgtttaggttggttttgaatttttggttttaagtcgttttttttttttggtttttttaagtgttgtagttataggtgtgagttattatgtttagtttgtaaggaaaattttaatggtttataaaatataataaaatagttgattgtttttagattgaaacgatgagaatatggtgtagagagtagtaaagatattattgtaatatttttaaatattataatagagtaatattttggtttttttttttgtgtgtgtgtgtgtttttttgatatagagtttttttgtgttatttaggttggagtgtagtggcgcgatttcggtttattgtaagttttgtttttcgggtttacgttatttttttgttttagttttcggagtagttgggattataggtgtatgttatcgtttggttaattttttgtattttttagtagagacggggttttatcgtgttagttaggatgtttttaattttttgatttcgtgatttattcgttttggttttttaaagtgttgggattataggagtgagttattgcgttttggttaattatgtgtaatatttttaagtgaggggatgaaaaaggaaagtgttttttttttttttttgagatagagttttattttgtagtttaggttggagtgtagtggtattattttggtttattgttgtttttatttttcgggtttaagtgatttttttgttttagttgggagtagttgggattataggtattcgttattatattcggttgatttttttatatttttagtagagatagggttttgttatgttgttcgggttgtttttaaatttttgattttaggtgatttattcgttttagttttttaaagtgttgggattataggtgtgagttattatgtttaataagaaaaattttaaagggtgaaaattatggttggttggcgtaatggttcgtgtttttaattttagtattttgggaagttgaggcgggtggattatgaggttaggagtttaagattcgtttggttagtatggtgaaaatttttttttattaaaaatataaaaaattatttgggtatggtggtgtgcgtttgtaattttagttatttaggaggttgagatagaattgtttgaatttgggaggtggaagttatagtgagttgagatggcgttattgtattttggtttgggcgataagagtgagattttatttttaaaaaaaaaaaaaaaaaaaaagttgtttgttaggaattttttttataatttttataattatttaatgatgttttgttttttttatttatgttacgatgagtaatttgggtgataaaatagtagtatatatagtgttttttttgggggtaataacgtatagtttggtattgtaattttgaaataatatgttttttaatagagtagtattagaaatggtgtttggaatatgttagaattttttttttttttttgttgtatttgttttttatattttttagttttgttgaaagtaatttagggtatgtttattaaattgttttgtgtatggagtgtttttattaaattatgtttattagtgttattttattgaagtttaagagaggtgttttttgtttttttttatattaatagtttagttgagattaaattattattaaaatggggatatttaatgattagatttagatgtttatttttaaatttttgtttttgtttttagtttttttttgataggtatttttagttttaagtttagtaggttttatttttgttgttattttaaaggtattaggttttatttatttgttagttagttttatatatttagtttttgaatagttttggaattgtataaagtttttaagttttaatattttatttatttaataggatattttgttttaattagaattggtagtatgaattttttgtttatattttaatttttagtattatatggagtttgcgagaattttattttatttgttagtacgttttaattattttttattttattgaattatatttaattaatggaatatgtttatattttggttatatttaaatataatttaaggttgggtgtggtttatgtttataattttagttatttaggaggttgaggtaggaggattatatgagtttaagaatttgaggttgtagggttttgttattgtagtttagtttgggtgatagagtgagattcgatttttatatattatatattttttgggtacggtggtttatatttgtaattttagtattttgggaggttgaggtatgtagattatttgaggttagaagttcgagattagtttggttaatatggtgaaattttatttttattaaaaatataaaaatgagttaggtgtggtggtacgtatttgtaattttagttattcgggaggttgaggtatgagaattatttgaatttgggaggtggaggttgtagtgatttgagattacgttattgtattttagtttcggttatagtgagatgttattttaaaaaaaaaaaagtagagtaatgtagtatttgtttttttgtaattgaaaattagtttatgttaattttatttttagtaggggtttttttttttttttttttttttattatttttttatacggagtttcgtttttgttgtttagtttggagtgtaatgttgtgatttcggtttattgtaatttttatttttcgggtttaggtagtttttttgttttagttttttaagtagttgggattataggcgtgtattattatttttagttaatttttgtatttttagtagtgacggggttttattttgttggttaggttgatatggaatttttgattttaggtgatttatttattttggttttttaaagtgttgggattataggtatgagttatcgcgtgtagtttataggttttaatagtagggtattggtgttattttgagttttttttgttagtttttggaggtgttaaggaaatgacgttttagtttgttttatgaatagttatagattatggatttttttgtatttaaaaggttattttttgattttttttttaaatgtgcgtgttattatatttagttaattttttaatatttttagtagagatagggttttattatgttgattaggttggtttcgaatttttgattttaggtgatttatttgttttggttttttagagtgttgtgaatttaggtgtgagttattgtatttagttttgattgatagttattatggtattgatatttttttgtgtatttgaatagtagtttttatttttggtttaatgaaggtatagtttatagtatttttaagataaaattttttaagtaattttaaacgtaaaaagaattataaattattattattatttgtgtattgtttttttaaatattgatgttaagttagatttttggatttggaaaggtttttaagatattttttggtttagttttttgttttaaggtagttatattattttagttattgtttgagataagttatggtttatagaggtaaggagatttggaggtagaagggaagaaggaggttgtgttggtgattggtagaagagttgtttatttatttatttattttgtatttattgtatttttattatgggttaagtattttttaggtattagagttagtagtgagtaaataaatagaagtttttgtttatttttatggaaggggaaatagataaattaaatatataaatatatgtaatttgttaaataataagtattgtgtagaaatatggaggggaaaagaaggatggggtttattatgattgagtagttgggaggtgtagtttgaaatgggatggatagggaagtttttattttatttgagtaaagatttgaagagaatgaataatgaagatattggggataatgttttaggtagaaggaaatttaaatgaatacgttttaaggtagtagaatatttaatatgtttgaggaaaatgttaatgtggttgaagtggagtgaatgagatggtgagtagtaggaaatgaggggtaagattattggttttattgattagtgtaaggatttggggattttattttgagaaagtttttagaaggttttgagtagaagcgggatatgagttaatttttttttttaaaggatattgatcgttgtgttaaaagaagagtgtaggaggttaatggagaagtagggaaataagttaggatgttgttatagtaatgtaggtgagagattggttgtggtttagattagggaagtattggtgaaggttgtgagaggtagttagattcggggtagatttttgaagattaagttaataaaatatgttgatatattgtaagtgggaatttttagtaatgttaaatttaaaggattttaattatgggaattttagagattatatgaaattgatgggtataattcgttagtgtatttttaagttgttaagcgtattgataaattgtgtttattagtttgaattgttgaattataagaagtatgttttggattttgggttaatatttttattttatatattgagtgaaattttattttatttttaatattattatatttttagtagttttttgtggtttataaatattttttgtaatttttattttatatgtattattttttgtttttaagtgtttttatttttttttaaggtagaagatgttgttagtttaaataaatcgagatttttagggaatgatagagttttttggaggagggatggaggcgtaatatgttacgttgtgtttgatagaggtagttatcgtggtaggtgagtagttgtgtttgaagggatgcgtttgaaaatattatttattttaaaagaaaaaaaatttataattttttagtttttgatttagtagaaaataatataaatttaggtttttttatgaggtgttttggtttttttttttttgaaacgggacggagttttatttttgtcgtttaggttggagtgcgatggtttgttttcggtttattgtaatttttgttttttaagtttaagtgatttttttgttttagtttttcgagtagttgggattataggtatgtgttattacgttcggttaattttgtatttttagtagagacggggttttattacgttggttaggttggttttaaatttttgattttaggtaattaatttgtttcggttttttaaagtgttgggattataggtatgagttattgcgtttagtttttatgtgtattttttattttggtgtgggtataggagggtagggaatttttttttttttttttttttttttttttttttttttgtttttttttttgagataaggttttgttttatcgtttaggttggagtgtagtggtatgattacggtttattgtagttttagttttttggtttaagatattttgttattttagttttttaagtagttgagattataggtatttattagcgtgtttagttaattattttatttttagtagagatagggttttattatgttgtttaggttggttttaaatttttgggtttaagttatttatttattttagtttttaaaagtgttgggattataggtatgagttattgtttttagtttgtttttggtaagtgttaaattttatttttttttttttttttgagacggagtttggttttgtcgtttaggttggagggtagtggtataatttcggtttattgtaatttttgttttttgggtttaagcgatttttttgttttagttttttaagtagttgggattataaggtgtatgttatcgcgttcgattaatttttgtatttttagtagagacgtggttttattttattggttaggttggtgtcgaatttttgattttatgatttatttgttttggttttttaaagtgtcgtgattataggcgtgagttattgtattcggtcgttaaattttattttgagtttgagttaagtagtttattttttttttgatttttatttgaaaaaaaaattaattagtatgtttatatgttagttgtttaaagaaaatattgatttttttgtaataga

SEQ ID NO: 232 - DNA, 6363 bp, Artificial Sequence
  chemically treated genomic DNA (Homo sapiens)
tttattataaaaaaattaatattttttttagatagttagtatatggatatgttgattaattttttttttaaataaagattagaaaaaaggtaaattgtttaatttagatttaaaatgagatttagcggtcgggtgtagtggtttacgtttgtaattacggtattttgggaggttaaggtaagtggattatgaggttagaagttcgatattagtttggttaatgaggtgaaattacgtttttattaaaaatataaaaattagtcgggcgcggtggtatgtattttgtagttttagttatttgggaggttgaggtagaagaatcgtttgaatttaggaggtagaggttgtagtgagtcgagattgtgttattgttttttagtttgggcgatagagttagatttcgttttaaaaaaaagaaaaaaagtgagatttagtatttattaaaaataggttgggaataatggtttatgtttgtaattttagtatttttggaggttgaggtgggtggatggtttgagtttaggagtttgagattagtttgggtaatatggtgaaattttgtttttattaaaaataaaataattagttgggtacgttggtgggtgtttgtagttttagttatttgggaggttgaggtgataggatgttttaagttagaaggttgaggttatagtgagtcgtgattatattattgtattttagtttgggcgataaagtaagattttgttttaaaaaaaaaaataaaagaaaagaaaagaaaaagaaaaagaaaaaaaaaattttttgtttttttgtatttatattaagataaaaaatatatatagaggttgggcgtaatggtttatgtttgtaattttagtattttgggaggtcgaagtaggttgattatttgaggttaggagtttgagattagtttggttaacgtggtgaaatttcgtttttattaaaaatataaaattagtcggacgtggtggtatatgtttgtaattttagttattcgggaggttgaggtaggagaattatttggatttgggaggtagaggttgtagtgagtcgagagtagattatcgtattttagtttgggcgataagagtaaaatttcgtttcgttttaaaaaaaaaaaaattaaaatattttataaaaagatttaggtttatattgttttttgttaaattaggaattaggaagttgtaaatttttttttttttaagataaatgatatttttaaacgtatttttttaaatataattgtttatttgttacggtgattgtttttgttaagtatagcgtaatatgttgcgtttttattttttttttaggaaattttgttattttttgagaatttcgatttatttgggttaataatattttttattttgaagaaaaataaagatatttgggaataaagaatgatatatgtgaaatgaaagttataaagaatatttatgaattataaaaagttgttgaggatgtaatggtgttggaaataagatgaaattttatttaatatgtagggtaagagtattagtttaaagtttaaggtatgttttttataatttaataatttaaattgatgggtataatttgttagtgcgtttagtaatttagaagtatattgacgaattgtgtttattagttttatatgatttttagaatttttataattagagttttttgggtttagtattgttgaggatttttatttataatgtgttagtatattttgttgatttaatttttagaaatttatttcgaatttggttattttttataatttttattagtatttttttgatttaagttataattagttttttatttgtattattataatagtattttaatttatttttttgtttttttattagttttttatattttttttttgatatagcggttagtgttttttgaagggaaaagttagtttatgtttcgtttttgtttaaaattttttgaggatttttttagagtaaaatttttaaatttttatattgattaatgaggttaatgattttgttttttattttttattatttattattttatttattttattttagttatattggtattttttttaagtatattggatgttttgttgttttagaacgtgtttatttgagtttttttttgtttgaaatattgtttttagtatttttattatttattttttttaagtttttgtttaaatggaatgagagtttttttgtttattttattttaaattgtattttttaattgtttaattatggtaaattttatttttttttttttttttatgtttttgtatagtatttattatttaataaattatatgtatttatgtatttagtttatttatttttttttttatgagaatggatagagatttttgtttgtttgtttattgttgattttagtgtttagaaagtgtttggtttatagtagaagtataataggtatagaataaatggatgaatgggtaatttttttattaattattaatataatttttttttttttttttatttttaggtttttttatttttgtggattatggtttattttaaatagtagttgggataatgtagttgttttgggatagggaattgaattagaagatgttttgaggatttttttaggtttaaagatttgatttagtattaatatttaaaagagtaatatatagatagtagtaataatttgtaattttttttacgtttaggattgtttgaagaattttgttttggaaatattataaattgtatttttattagattaaaagtgggaattattgtttagatatataaaaaggtattagtgttatgataattgttagttaaggttgggtgtagtggtttatatttggatttatagtattttgaaaggttaaagtaggtggattatttgaggttaggagttcgagattagtttggttaatatggtgaaattttgtttttattaaaaatattaaaaaattagttggatgtggtggtacgtatatttaaagaaaaagttaaggggtgattttttaggtataaaaggatttataatttataattgtttatagaataagttgaaacgttatttttttggtatttttaaaagttggtagagaagatttaaagtaatattagtattttattgttaagatttgtgggttgtacgcggtggtttatgtttgtaattttagtattttgggaggttagggtgggtggattatttgaggttaggagttttatattagtttgattaataaggtgaaatttcgttattattaaaaatataaaaattagttgggagtggtggtgtacgtttgtaattttagttatttgggaggttgaggtaggaaaattgtttgaattcgggaggtggaggttgtagtgagtcgagattataatattgtattttaagttgggtaataagagcgaaatttcgtatgggggggtggtaaaaaaaaaaaaaaaaaaaaagatttttgttgagaataaaattagtataggttaatttttagttataaaaagataaatattgtattattttatttttttttttttgagatggtattttattgtagtcgaggttagagtgtaatggcgtgattttagattattgtaatttttattttttaggtttaagtgatttttatgttttagtttttcgagtaattgggattataggtacgtgttattatatttggtttatttttgtatttttagtagaggtggggttttattatgttggttaggttggtttcgaatttttgattttaagtgatttgtatgttttagttttttaaagtattgggattataggtgtgagttatcgtgtttagaaaatatatgatatatgaaagtcgagttttattttgttatttaggttggattgtagtggtaggattttgtaattttaaatttttgggtttatgtgatttttttgttttagttttttgagtagttgggattataggtataagttatatttagttttgagttatatttaaatatagttagagtgtaagtatgttttattaattaaatataatttagtgaagtaaaaagtaattagaacgtgttagtaaatgagatagagttttcgtagattttatatgatgttaagggttaaagtatgggtaaagagtttatattgttaattttaattggggtagaatattttattggataggtgaaatgttgaaatttgaaggttttgtgtagttttaggattatttaaaaattgaatatatgaaattgattggtaggtaggtagagtttgatatttttgaagtgataatagagataggatttattaggtttaaagttaaaaatatttgttaggaaagagttgagagtagagataagaatttagaaatgaatatttaggtttagttattaggtatttttattttggtgatggtttgattttaattgaattattgatgtgaaaaagaataaaaaatattttttttaaattttaataaagtagtattaatggatatggtttaataagggtattttatgtatagagtagtttggtaagtatgttttggattgtttttagtaaaattaggaaatatgaggaatagatgtagtagagaaaagaaagagattttgatatattttaaatattatttttgatgttgttttgttaaaaagtatgttattttaaaattataatgttagattgtacgttattatttttaagaggaatattgtatatgttattattttattatttaaattgtttatcgtgatataggtaaggaaagtaaagtattattagataattgtgaaaattatagaaggaatttttgatagataattttttttttttttttttttttggagatggagttttatttttgtcgtttaggttagagtgtagtggcgttattttagtttattgtaatttttattttttaagtttaagtagttttgttttagttttttgagtaattgggattataggcgtatattattatgtttaggtaattttttgtatttttagtagagaagggtttttattatgttggttaggcgggttttgaatttttgattttatgatttattcgttttagttttttaaagtgttgggattaaaggtacgagttattgcgttagttagttatgatttttattttttaaaattttttttgttgggtatggtggtttatatttataattttagtattttgaaaggttgaggcgggtggattatttgaagttaggagtttgagaatagttcggataatatgataaaattttgtttttattaaaaatataagaaaattagtcgggtatggtggcgggtgtttataattttagttatttttagttgaggtaggagaattatttgaattcggagggtggaggtagtagtgagttaagatggtgttattgtattttagtttgagttatagagtaaaattttattttaaaaaaaaaaaaaaaatattttttttttttatttttttatttaagagtattatatatagttggttagggcgtagtggtttatttttgtaattttagtattttgggaggttaaggcgggtggattacgaggttaggagattgagagtattttggttaatacggtgaaatttcgtttttattaaaaaatataaaaaattaattaggcggtggtatgtatttgtagttttagttatttcggaggttgaggtaggagaatggcgtgaattcgggaggtagagtttgtagtgagtcgagatcgcgttattgtattttagtttgggtgatatagagagattttgtgttaaaaaaatatatatatatataaaaaaaaaaattagagtattattttattgtaatatttaaaagtattataataatatttttattgttttttgtattatatttttatcgttttagtttaaaaatagttagttattttattgtgttttgtagattattaaaattttttttgtaggttgggtatgatggtttatatttgtaattgtagtatttggggaggttaaggagggaagacggtttgaggttaggagtttaagattagtttgggtaatatagtgaaattttgtttttacggaaaataaaaaaaagaaaaaaattatgtcgggagtggtggtttatatttgtaattttagtattttgggaggttgaggtgggtggattatttgaggttaggagttcgagattattttggttaatatggtgaaatttagttattattaaaaatataaaaattagttaggcgtggtggtagacgtttgtaattttagttattagggaggttgaagtaggagaatcgtttgaattcgggagacgtaggttgtagtgagtcgagattatattattgtattttagtttgggtaataagagtaagattttattttaaaaaaaa

SEQ ID NO: 233 - DNA, 7245 bp, Artificial Sequence
  chemically treated genomic DNA (Homo sapiens)
agggtcgaagagttttggtatatttataggttttaaaaggttaggttttttggtggtaaaagttttatagattagtaaaattttattgtagaagatgggaaatatagttgtaatagaaaaggttggagttaagagtttggaagattttagtttcgtttgaaattagttgtgggaattaacgtatgttatggaggttttttgggttttgtgttttaatttggaaaatgggagtaagaaaagtaattaggggtaggataaggggtaacggtatttagcgatagatgggaagttgaggtttatatgtgattatatttttttttttgtagtgttagagtcgttggatataaggggaaggaaggtttaggtttgtgggttttgtagtttcggagttttttattatttagattggatcgtcgttatttgtgtgtttgtttttattttttgggaggagtttggtcgtttgtaggtagagtttacgaattaaattagtttaggttttgttttttttttatttttattagttaaggcgagtttattaaggtttcgtattaatttttattttatttaaaaggggtaaaagtgattttatagttttatttgaggtaatttatatttcgttattggttatacggttttagtttttttttgtttgttgtgttattaaatttattaataggatatttttttaggggaaatttgattgtcgttttattagaaaggtatataggtaatatatttttattcgaggttatggtttgttcggttttttttaattttgttatttaaggagttaattttttaatgtacgtattgtgtagaggatatttttttttttttttaatataattggatagttttagaggattttaggagtttaatgtagaaatgaaggtttggggtcgatgggataggattttttagattttttaggatttttggaggggttgtaatatatgtttatggttggtattttatttcgttttgtcgagagtttgttttttagagtattatattgggaaggggtgagttatatttagattattttggttttatagtttagttattttttgtttttgttttatttttttttcgtttttttttttttttttttttttttttttatttttttttttttttttttttttttttttttgtttttttcgtcgatttttttttttttttttagttttttttttaattttttttttgtttggttttttttttttttttgttttttttattttttatttttttttttttttttttttttagatttttataattgtgaaaatattgttttattttttattttttttgtgttttattttttttcgttttggtgttgtttttttagaataagtttaatttttaatgtttttttttagttgtttttaaatggtttagttttgtgggaggaatgggttttaggttatattagtttaggtgtggagtaagaggtagggaggttttcgtggatatatataaatattttaaatataaaatggagtattgtggtagtggttaggttgtgttaggggagtaattaagttttattcgttttttaatgaggaaatgattataatggtaattttaaatgggtttgttattgttaaaggttaaattttagtttatggttgtatgaagggattttattaataaatggtataatgttttatgtagattttataatgtatataaataggaggagaaagtcgtttagaaatttttagatttttaagtgttaatggttatttagacgttagtgggagtttaaatattttgttggttaggtatagtggtttatgtttgtaattttagtattttgggaggttgaggcgggtagattgtttgagtttaggaatttgagattagtttgggtaatatggtaaaattttgtttttattaaaaatataaaaattagttaggtatgatagtatgtttttgtagttttagttatttgggaggttgaggtggagggattatattaagtatagggagattgaggttgtagtgagtttcgattgtatttttgtattttagtttgggagattaagggagtttttattttaggagaaaaaaaaaaaagaagatatatacgttttttttgtttataatttagtgttttattgtttttgtcgtgtaatttatcgaattattataaggttaggaagtataatttttataagtgtttagaaagggggagaattggaatattcgaggtatagtgtttatagttattatatagtttttaattattaagttcgatttagttttttagtgtattgagttgttatttttttatcggaaaggtgggaatagtaattttattttgtagggttattgtggtgaataaatgagataatatataaaaattttaagtttaggaatattgagtcgtagttattagtatgtttatgtgtgaagtttaggaatattttggggttgtttagttcgatttttttttagtgtaatgataaattaagatacgggatttagaagagttttttgaaataagaggataagtttgggaaatgttgttgttttttgagtgtatgaaattatttttagggaatttagagagaaaggaaaatttttaggaggataattagtggtaatagttaatgtgtaaatgtgattatgttagtatatacgtagattgttgagcgtttttttaggattttttatttaagattaattaaatgtttggaattaggaagattgagagggttttttttaggaagttattttaggttagtaagatattttagggtttatttatagaggtggaacgttttagaggaggaggaagaagagggtagtttaattgagagtattttagaggaggaataggaggttagaagggttgaaaattatttaggatattgtagggttttttcgttttaattttggttttcgagggtttgaggttttgtgtgatgtaagaaaataaaattagggtttgtgttggtgattgtaaaatgagaattgtttgtggaatggtatgggttcgtttttttttgttacggtgaagaattattataaatttagttgtttgaaataatataagtttattgttttatagatcgggaggttaatagttcgaagttagttttattgggttaaattaattttgttagtcgagttggttttttttggaggtttttaggggagaatttgtgtttttgttttttttagtttttaggggttattggtattttttagtttatgtttttttttttcgtttttaaggtttaaatttagtttatgttttgttataaattggtgttttttggtttaaaggaattaacgcgaatatgggcgttaaaataaaaaacggggaggtttttggtttgggggtttttttaaaattttttaaacggagttggaattttaagagtttttttattaatttcgaataggtttgggaagagtttttttttttaggttttgttttttttcgtattggttgtattttatattataggtgttggtgttaatattatttttagcgtttttgagttatgtttagtattttttgttgtttttggttataggatttgtagattttttggagtttgtgggatatacgtggagtttatatatttagtttagtatgagtatttttggttgtaggggattatatttaattatggtttttttttatattttaatgatttattttttttcgttttttagatttttttgtttatcgggtagttgtgggtaggagggtaggtacgatattttacgtaagtgtgtgtgtgtaaatatatatatatttttttttttttttttgagacggagttttgtttttgttgtttaggttggagtgtagtggtataatttcggtttacggtaattttcgtttttcggttttaagtgatttttttgttttagtttttcgagtagttgggattataggcgggtgttatcgcgtttggttaattttgtattttttgtagagacggggtttttttatgttggttaggttggtttcgaattttcgattttaggtgattcgtttgtttgggttttttaaagtgttgggattagaggcgtgagttatcgcgttttgttttatatattttttttgtttgtttttggttggtgtatatatatatagtttagattttatattatatatataataattttgaggttttcgtgggtagaaatgatttaagttagtgtgtgggttgtgtgtgtttttgttagtatttagggatggggataggttttgggtttgttagtgttttgtagttttgagaatagtagaaggttagaggttaaggttgatggtgagaggatagtttttgcggaggagagtttagtgtttatagatttttgtggttatggttataggtttttggtttttaatgagtttgattttgtttttggggtttttgtagtgaggtagagtttggaaaaattgtttaaagataaggtttgatatttagggggttggcgtgaagttgataaggaaggggttaaagttttgttaattttaagtaagtgtattttattataatgaatgttggttttgtttagggagtttttatttttagatatagagaaagttgaggatttataggattttattataatttttattttattttatttaatagatgttatagagtagtgaattaggtatttgttgtggtagaattttttttttatttttagtatttttggtttgaaaggtagatttgtagatttttaggaagttattttaattaaaatttttaagatttttttgttaagggtttggtaatagggaggagggggtatgttgtagtggttgaatttttatttttagggatattgatgaatttgttttttgtttttttattttttttgtttttttttttttttttttttttagttttttttattggtttaggaagtttatttagtttcgttacgtagagtttagaaggaaagaaagttttatgtttgagtcgaggggagtattatggatttgataaaaatgggtatgatttagttgtagaattttagttattacggggttattgtgtaaggttaattagatgcggttggtcgggattttgtgcgatgtggttattatggtggatagttaggagttttacgtttatcggacggtgttggtttgtattagtaagatgtttgagatttttttttatcgtaatagttaatattatattttggattttttttcgttaaagattttttagtagattttggagtatgtatatatagttacgttgtaagttaaggcggaggatttggatgatttgttgtatgcggtcgagattttggagatcgagtatttggaggaatagtgtttgaagatgttggagattatttaggttttagacgataatgatacggaggttattatggtcgatggcggggtcgaggaagaagaggatcgtaaggttcggtattttaagaatatttttatttcgaagtattttagcgaggagagtgggtatgttagtgtggttggatagagtttttttgggtttatggtggattagagttttttagtttttattttatttggttttttagttatgagttttattaaggttgtagtggatagtttgatgattataggatagttttttttgtagggaattttttagttatttgtagggttcgaggagttaattttggttgggggtgggcggtattttggggtggttgaggtgaagacggagatgatgtaggtggatgaggtgtttagttaggatagttttggggtagtcgagtttagtattttaggagggatgggggataaggttgaggaaagaggtaaagaggggtttgggatttcgattcgaagtagcgttattattagtgttagggagttatattatgggcgagaggagagtgtcgagtaggtgttatttttagttgaggttgttaggttttattggtcgatttgagtatttagtattttcgtttgagaagtatttgggtatttatttcgtgttgtttaattataaggttgacgttgtattgagtatgtcgtttttcgtgatttttggtttttacgtgtagtttgttttggttgtttttatggattttagtatttatggggggttgttgttttagggttttatttagagggagttgtttagtaagttgggggagttggttgtgggtatgaagttagagagtcggattatcggagagtagtgtagcgtgtgtggggtcgagttttttgataacgaggttgtggagtagtataggtaggtttcgttttagtttcgtatttgatgtaggatttgaggtttttatattttttttttatattttggttgtttttaagttaggggtttggtttttttgttttggtaatttgtgaaaaaattagaatattttttttaaagttttggcggggaggggagtaggttttttaaagtgtagtgagggggtttaggatttttttaaaaagtattaggggatatttatgggcgtagttttttaataggtttttttttttgttttttgtttttgggtttttgtttgttttttcggttgtttggtttgtttttttttgtttggagtgattgataaaatggagagaaggagaaaaggagtgggatgagggttttttgggttttgtatttgattatgttattaggttttaggttttcgggtttttatgtagtggtttttgtgaagatagtttgtttttttttgtagtttgggagaatgggagggtttgggggttgtttaagttataagagtagttgtaggttttgaattttatttttggtgaaagttaatttttttgttttgtttttttttttattttttgattttgtatatgtatttagggggaattgatttaaatgtaaggggaaaggatgggtataagagttttggttttgtagtttgtgaagttttatttttattttatttttgtttatattgaattaaatgtcgttttaggttagtattggttttttttcggttttcgtttttttttttatgaaataattatttattgagtttttatgatatgtttggtttagtattaagtattttttatgagttgtatttttattataatagttttttgagataggtaatgttttttttttttttttggatgtgaagtttcgttttttttgtttaggttggagtgtaatggtgtgatttttgtttatcgtaatttttgtatttcgggttaaggtgatttttttgttttagtttttcgagtagttcggattataggtacgtattattata

SEQ ID NO: 234 - DNA, 7245 bp, Artificial Sequence
  chemically treated genomic DNA (Homo sapiens)
tatggtggtgcgtgtttgtaattcgagttattcgggaggttgaggtaggagaattattttaattcgggatgtagaggttgcggtgagtagagattatattattgtattttagtttgggtaaggagagcgaaattttatatttaaaaaaaaaagaaggatattatttattttaaagggttgttgtaatgaaaatgtaatttatggaaagtgtttagtattgaattaaatatgttataagagtttaatgaatggttattttatagagaaggaaacggaagtcggagggaagttaatgttagtttgaagcggtatttagtttagtgtgagtagagatgggataagaatgagattttataggttgtaagattaagatttttatatttattttttttttttgtatttaaattaattttttttaaatgtatgtgtaggattagagaatgagaagggagatagagtaaggagattaatttttattaggaataaggtttagaatttgtagttgtttttgtggtttaagtagtttttagatttttttatttttttaagttgtagaaagggataggttgtttttatagggattattgtatgggaattcgaggatttgaaatttagtaatatggttagatgtagggtttaagagatttttattttattttttttttttttttttttattttattagttattttaagtaaaggagaatagattaaatagtcgaaaaaataaataggggtttaaaagtaaaaaataaagggaagggtttattaagaagttgcgtttatgagtgttttttggtgttttttggaaagattttaggtttttttattatattttaaaaaatttgttttttttttcgttagaattttagaagaagtgttttggtttttttataaattgttaagataggggagttaggtttttaatttgggagtagttagggtgtgaaggaggggtgtgagggttttaagttttatattaggtgcggggttggagcggggtttatttgtgttgttttatagtttcgttattaggaagttcgattttatatacgttgtattgtttttcgatggttcggttttttgattttatgtttatagttagtttttttagtttgttgaatagttttttttggatgaagttttggggtagtagttttttataggtgttgaagtttatggagatagttagggtaggttgtacgtggaggttagaggttacggaagacggtatgtttaatatagcgttagttttgtggttgggtaatacggagtagatgtttagatgttttttaggcgggggtgttgggtgtttaggtcggttagtggggtttggtagttttagttgggggtggtatttgttcggtatttttttttcgtttatagtgtagttttttagtattggtgatgacgttgtttcgagtcggggttttaggtttttttttgtttttttttttaattttgttttttattttttttgagatgttggattcggttgttttagggttgttttggttgggtattttatttatttgtattattttcgtttttattttagttattttagggtgtcgtttatttttagttagagttggtttttcgggttttgtaggtggttgaagagttttttgtaggagagattgttttatggttattaaattgtttattgtagttttggtgggatttatggttgaaagattaaatgaagtggagattgaagggttttggtttattatgggtttagggaggttttgtttagttatattggtatatttatttttttcgttggaatgtttcgagatgaagatgtttttgaggtatcgagttttgcggtttttttttttttcggtttcgttatcggttatggtggttttcgtgttattgtcgtttgaggtttggatggtttttagtatttttaggtattgtttttttaggtattcgatttttaggatttcggtcgtatatagtaggttatttaggtttttcgttttggtttgtagcgtggttgtatatgtatattttagaatttgttggaaggtttttggcgagaggaagtttaaagtatagtgttgattattgcggtggaagaggattttaaatattttgttggtgtaggttagtatcgttcggtgggcgtggaatttttggttgtttattatgatgattatatcgtataaagtttcggttagtcgtatttggttggttttgtatagtagtttcgtggtggttagggttttgtagttggattatgtttatttttgttagatttatggtgtttttttcggtttaggtatgaggttttttttttttttgggttttgcgtggcggggttgggtgggttttttgggttaatagaggaggttaggagaaagaagaggggaagaagtaaaagagatgagagaataaaagataaatttattagtgtttttaaaagtaagaatttaattattataatatgtttttttttttttgttgttaagtttttagtaagaggattttagagattttaattgaagtagttttttagaaatttataaatttgttttttaagttagggatgttgagagtaaaaagaaggttttgttatagtagatgtttaatttattattttatgatatttgttagatgaagtgaaatgaaaattgtagtgaagttttataagtttttagttttttttgtgtttgagagtaggggttttttaggtaaggttaatatttattatgatgaagtgtatttatttaaaattagtaagattttagttttttttttgttagttttacgttagttttttggatgttaagttttatttttaaatagtttttttaaattttgttttattataggagttttagaagtagagttaaatttattggaggttaggagtttgtagttatggttatagaaatttatggatattgggttttttttcgtaaaggttatttttttattattagttttggtttttggttttttattgtttttagggttgtaaagtattggtagatttaaggtttgtttttatttttaggtattaataggaatatatataatttatatattaatttgggttatttttatttacggaagttttaaagttattgtatgtataatataaaatttgaattgtgtgtatgtatattagttagagatagatagaaagagtgtgtggggtagggcgcggtggtttacgtttttaattttagtattttgggaggtttaggtaggcggattatttgaggtcgggagttcgagattagtttgattaatatggagaagtttcgtttttataaaaaatataaaattagttaggcgcggtggtattcgtttgtaattttagttattcgggaggttgaggtaggagaattatttgaaatcgggaggcggaggttgtcgtgagtcgagattgtgttattgtattttagtttgggtaataggagtaaaatttcgttttagaaaaaaaaaaaaaagtgtgtgtgtgtttatatatatatatttacgtaaggtgtcgtatttatttttttgtttataattgttcggtggataggaggatttaaaaaacgaagaaggatgggttattaaggtatggagagagattatagttaaatatggttttttatagttaggagtgtttatgttgggttgggtgtgtgaattttacgtgtgttttataggttttaaggagtttgtaagttttgtgattaggggtagtaagggatgttggatatggtttagaggcgttggaagtgatattggtattagtatttgtggtgtgaagtataattagtacgagggaagatagggtttgggaaaaagggttttttttaagtttgttcgggattaataagagggtttttagaattttaatttcgtttaagggattttaaaaaagtttttaggttaaggattttttcgttttttgttttaacgtttatattcgcgttgatttttttggattaaggaatattaatttatgatagaatatgaattggatttgagttttgaagacggaggaaggggatatgaattgaagaatgttagtgatttttagaaattgaaaaaggtaagggtatagatttttttttgagaatttttagaaggaattaattcggttggtagaattggtttaatttagtgaaattgatttcggattgttgatttttcgatttgtaagataataaatttgtgttgttttaagtagttaaatttatggtaattttttatcgtggtaaaggaaaacgaatttatgttattttataggtagtttttattttgtaattattagtataaattttagttttgtttttttatattatataaaattttagattttcggaggttaaggttggggcgggaggattttgtaatattttgagtgatttttagtttttttggttttttgttttttttttggagtgtttttagttgagttatttttttttttttttttttttggagcgttttatttttgtaaatagattttgaagtgttttgttggtttggaatagttttttggagaggatttttttaatttttttggttttaagtatttaattagttttaaatgaagagttttggagaagcgtttagtagtttgcgtgtatgttgatataattatatttgtatattggttgttgttattgattgtttttttggaaatttttttttttttttgggttttttgaaggtggttttatgtatttagagagtagtagtattttttaaatttgtttttttgttttagaggatttttttaaatttcgtattttgatttgttattgtattgaaaaagggtcgaattgaatagttttagagtatttttgaattttatatatgaatatattaatggttacgatttagtgtttttaggtttgagatttttgtatattgttttatttatttattataatgattttgtaaggtagaattattatttttattttttcgatgaggaaatggtagtttagtgtattgagggattgagtcgagtttggtgattagaaattatgtggtaattgtgagtattgtgtttcgaatattttagttttttttttttttgggtatttgtaaggattgtattttttggttttgtggtggttcggtgggttgtacgataaggatagtaggatattgagttgtgagtagaaaggacgtgtgtattttttttttttttttttttttgaaatggaggtttttttggttttttaggttaaagtgtaggggtgtaatcggggtttattgtaattttaatttttttgtgtttagtgtgatttttttattttagttttttaagtagttgagattataggggtatgttattatgtttggttaatttttgtatttttagtagagatagggttttgttatgttgtttaggttggttttaaatttttgggtttaagtaatttgttcgttttagttttttagagtgttgggattataggtatgagttattgtgtttggttaataaagtatttaagtttttattgacgtttaagtggttattagtatttagaaatttgaaaatttttagacgattttttttttttgtttatgtgtattatgaaatttgtatagagtattatgttatttgttgatggggtttttttatatagttataagttagggtttggtttttagtagtaataaatttatttggggttgttattataattatttttttattgaagagcgaatagaatttaattgtttttttgatataatttaattattattataatgttttattttgtatttggggtgtttgtgtatatttacgagggtttttttattttttgttttatatttaggttggtatggtttggggtttattttttttatagagttgaattatttggagatagttgggaagaagtattagaaattgaatttgttttgaaaggatagtattaaagcgggagggaatggagtataaaaaaagtgaaaggtaaaataatatttttatagttgtggggatttggagaaggagaagaggggagaagtaaaaaataagaggaataagaagaaaaagaagattagataggaagaaagttaggaaagaaattgaggaggaaaaggaagatcggcggaaaaggtaaagaagaaagggagaaaaaagagaggaaaatggaaggagaaaagaaagagaaggaggaggcggaggaaggatgaagtagaagtaggaggtggttgaattatgaagttagggtggtttgggtgtggtttatttttttttagtgtagtattttagaaagtaggttttcggtaaggcggagtggggtgttagttatgagtatgtgttataatttttttagaggttttgagaaatttaggagattttgttttatcggttttaagtttttatttttgtattgagtttttggaattttttgggattgtttaattgtgttaggaaggaaagaggatgttttttgtatagtgcgtgtattagagaattagttttttaggtaataggattagagggagtcgggtaggttatggtttcggatggagatgtattgtttgtgtgtttttttgatggagcggtaattaagttttttttgaagaaatgttttattaatggatttgatggtataatagatagggggaagttggagtcgtgtggttagtggcggggtgtaaattgttttagatgaaattgtggagttatttttgttttttttaaataagataagaattagtgcgaggttttgatgaattcgttttggttggtggggatgagggaaaagtagagtttgggttaatttgattcgtgagttttgtttgtagacggttaggttttttttaaggaatagaggtagatatatagatggcggcgatttagtttgggtaatgaaaagtttcgagattgtaggatttataggtttgagttttttttttttttgtgtttagcggttttagtattgtagagagaaggatgtgattatatgtgggttttaattttttatttatcgttggatgtcgttgttttttgttttatttttgattgttttttttgtttttattttttaggttaaaatatagagtttagagaatttttatgatatgcgttaatttttatagttaattttagacggaattgagattttttagatttttggttttagttttttttattatagttgtgttttttattttttgtagtaaaattttattagtttgtaaaatttttattattaaagagtttgattttttaaaatttataaatgtattaaaatttttcgatttt

SEQ ID NO: 235 - DNA, 6155 bp, Artificial Sequence
  chemically treated genomic DNA (Homo sapiens)
cggatagaaagtagtaagtatttttaaaatagattaatgttattagttttataaaattgttgaggtaaagattatgtttagaaataaaatatttgaaaaatggtagtttttttttgtaggttaatttttttttttagtgttatttatttattgtatattttttttattttttatggaaaatattttgaaaggtatttttttatttaaattattttttttaatatgtttttttttttttttttttgtttttgtatagtttttttttttttttttattttaatttatttgtagaaattgatgttttttttttattgaattttatttttaggaaatttggtttagtgttatttttaggttattttaaatagtaataatagtaattataatattaatattatatagaatatttaattatgtgttagttattgttttaattgttttatattgttaggtgtggtggtttatgtttgtaattttagtatttagggaggtcgagttgggaggttcgttttgaggttaggattttgagattagtttgggtaatattgttagattttattgttataaaaatataaaaattagttaggtatggtggtgtatatttgtagttttaggtatttaggaggttgaggtgggaggattatttgagtttgggagtttgaggttgtagtgaattatgattgtattattgttttttagtttgggtaatagagattttgtttttaaaataaataaataaataaataaatattaaattattttatgttaatatttaatagttataatatttttaaaaagaaggtattatttttagttttatttgttagatggggtatttgatagtatagagaggttaagtaatttaagattgtaaagttagtaagtggtagagttaggatttaaattttggttttagttgtagaatttgtggatttaattattagattaatttttaggtattagtagatattatttttatattatttattttttttttatttataaatattattttggtttaagattttatttttatttatttttatgtattttggttttttagtggtgtttttttttgtgtttttttaaattatagttattttataattgatgaattttagtgtaatttagtattttttttagatgtttttaagaggtgtagggttttttgttttaaatttaagaaattatttttattttatatttttagtaggagatagtagattatttattagttttagaatatattagttatttgggatgttttttgttttttagcggagggttaggtaagagagaataaataaaaaagttaagaaatttttggtaaataattttttatttaggtttttaatttttttatttttttaggtttgaagtatatttgaagtaggaatttagggggttttaggatgttttaggaaaagaatttttttaggaataggaaaagttatatttttttgggtatagtaggagtgacgtagtagaggtaggtttttgtggattaatttgtagtaaagttatgaatttagagttttgtaaagaaaaggataagtttatttttaaggtagaattagttttgacgaatggttagtgttgtagggagttataaggatagagaagatagaatttttatttagttttgagtttgagaatattagaaaaaaggaaggaaagagattattagaggagggtttgaagatttggtgaagtaggaaagagatggaagtatattttttttttggaaggagtgtaaagattaagttttagaattaattttagagttagaagagaggaaagaggttttgggagtttttgagaattttatttgttagaatagcggtgttagtttttatgggttaggttatattagagaagatatatcgggggttatggatttaatttggtttataggtatgttttgtttgatatgtttttgtgtttttaaaaaaaaatagaatgagttgttaatatttaatatttgtgaggttttattttaaaatttagatttttgattttttttgattttttaaatattatatttttttttggaaattattagttggaagtgtttgtgttttttagatttgtttgagttgtggatttttatgtttaggttaaaatattaattttaaaagtttatatgttgtatgattttatttagataatatttttgaaatgatgaaagtatagagatggagaatagtttagtggttattagaggataggtatggagttgggtgagcggttgtagtgcggaaggggatttgtgaatattaaaaggtagtatgagggagtttttttgtggtgatggaatagttttatgtttttattataggagtggttataaggatttgtaagtgaggtaaagttgtattgaattatatatatatatatatatatatatatatatatataaaatagaatataggttaagaaaatggtaagtaataagttttgaagtttatagtaaatagtaatgtattgttgtcgattttttggtgtgaaagttgttataattaaaatggagttattaatgttaagaaattttgataaatagagttagggaaggttgtttacgaagagagggtttttatatttgtatatttgataataaaaattattaaaaaaagattgtaaaatttataattttgtataaaggttattataattttatataaaaaaatatttttgtaaggatatttttttagtaaatgtttgtttaatttcggattggcgttatttttgttattgatttttgtagttaaggataattattttaaaataattatgtaattttttttatttttttttttaaatatttttgtttttttttatatttttgaatatgcggttaattgtgatgtgtatatttttattgtaatgttttatttttaaataaatattatttttttttagaaagtttttttgttatttaggttgatattgattttgatgttttattagagttttgtaagatgttattattggggaaagtatgggattttggattatttttgtaattttttgtgagtttataattattttaaaataaaaagttaaaaaaaaaaaaaaggaaaagtaagtaggttgagtatttacgggtggtgtttagggaagtgagtaagaggagtatggagagttaatttgaagttgagaagtttttttagtttaatttataaaggatttaagtttgttttttattatcgtttttgttgttattatttttgtagtgtttttcgttttgtttattttagatagttgtttttttatcgtttgttaggttgttgagtagagaattagatttatttttaatagtaaattaattaattttagtttattggatgtaatttttaggttttgagttttttttagttattagtttttttattgtttaatattgagagtcggtttttttgttgttagaggtgttttttattatgacgtttgaatttgatgttattgcgggtgttagaagttgttagaaggttgttttttagataattgttttttggttttaatttgtgttattgttttgttgtaattaatatttagaatatgtgcggttattttattaaaatttatattttttaatggagaaagtatatagagagagttgattgtggagttgtggtttatttttgtttttagttatttgtgtttaaattaagttgaatttttgggttttagttatttttaaataggtattacgatttattaaggttaatgtttgagggaatattaattttgtagatattaatttaatttagtgttattataagtgtataatgtaggagtttggaattttgttaaaaagtattatttaaatgaatatttagttggtaaggggtgggaaggcgggtgtggaaaagggaaggagaatattagaaatggttttatagatatttttatgtttttttttttttttttttttttaaaggttacgtttaagtattgtagagaggcgttaaatggaatttttatattattatgaagaaattttaatgaacgcgttttattttacggtaagttttagatgtttataattatttaatatttattgagtattttttatgttatatggttgattttgtgttagggtgtgtatataaagatgagtaattgtaaacgatggtagtatgtagaagtattttagggcgtttaatgttagttgacgaaggtattattaaggaggttatagtttggttaaagggtttttaaaggatgagataattgtgtaattttagttttatagagattattattaagtttttgttatataaagtttgggttttaggtgaaatgagaagggtaaggttttgtttaagagggtttagggtcggattttttgatttgtgtttatgtttatattttgtattttagtttgtagatattaatagggtttgttagttttaagggcgtagggttatatttttcggaaaaggtggtatttgaaggtggtaagaggttaacgattggaggtggcggcgaagggttaggtaagatagaataaatgaaaaagttaagatatttttggtaaataattttttatttaggttttcgatttttttatttttttaggtttgaaacgttttcgaattttcgagttttttattttttaagcgttgggtattggttaaggttgtaggagtagggagtttttcgttttaagagagttttttagtttcgattttttttaaatcgttttttttttaggtttagtttggggggtttgcggttcgggtttagtttttacggttattttgggttggtgatacgtaggcgtcggaatcgaagttacgttgtgtttttttagttaggtttttgcgttagacgagggcgggcgtcgcggagcgtttttcgtgtgcggggttttttataatgtatcgggtcggtagtggcggcgatcgcggcggcgttttagttgcggtatgtttgcgtttttattgttttgggaggaggaagagaaggaggaagaggaggaggaggaggagggggaggaagaggagaaaggcgtaggggtgggagttgttgtcgaagttgttatagtaaaagttttttttttttttttttttttttttttttaaggtttttagaaaggttggagttgtcgtcgtttgtagtcggtgatcgcgcgattcggcgttcgttcgcggtaaagcgttcggtttggtaggttcgggttcgggggagggcgggggagggggagggggcggcgcgcggggggagcgcgcggcggtaacggtttgatttcggggggagcgagtcgtggcgaggttgggggtggttagggggttagtcgaggtcgagggaaacgttggggttggttgggggacgtgaggaagtagggcgcggagggtgggttggggggttgaggagggataatgacgggggtggcggaggcgagaaggcggttttcgaggttggaggcgggtgttagaggtaggggaggaggtgggatgtttgtacggggaggtcggagggtgttgggtgtgggtgtgaaaaggttagggagatattagggttttgtttatcgtgtttggtgtagtgttttatgtatcgtaggttttagttattgttgttgtcggagtgtgttttttgggagaagggaagggtaggggttggagaaaagggaatgtttgtaggaaacgtagtgggagtgcgaatagggcgaggggtcggaggaaagatgtcggagaggtggaggaatgcggggaggtggttgtggaggagttttgaggattttggggggtgtttattgtgtagatacgttaggtattttattatggaaagaattgaagcgttttttagggaaggaaagaagggagataggagttttcgtgaatagaaaggatcgcgtttgaagtaagagggagtgttaaatagtagagaagatgtagggaatgtataatagaatagatagatgtagtataattaataaatattggtttaagtattgaagagttattttagatgggtcgggatggtttagtttcgaatttgtgtgggttgtttagtagatgatatttggtaagtgtgggtttgggtcgtggttggggttattgagaattagattttagtttgtagtttggtttgtgatattttagacgtgtattaatgagtatgagaatttttgaagtagattttgagaaagg

SEQ ID NO: 236 - DNA, 6155 bp, Artificial Sequence
  chemically treated genomic DNA (Homo sapiens)
ttttttttaaggtttgttttagaggtttttatatttattggtgtacgtttaaaatgttatagattaaattatagattaaaatttaatttttagtgattttaattacggtttagatttatatttattagatgttatttattgaatagtttatataggttcggaattaggttatttcggtttatttggaataattttttagtatttaggttaatatttattaattatattatatttgtttattttattatgtattttttgtattttttttattatttagtatttttttttgttttaaacgcgattttttttatttacgggaatttttattttttttttttttttttttgagaaacgttttagttttttttataatgaaatatttaacgtatttgtataatgaatattttttagaatttttaagatttttttatagttattttttcgtatttttttattttttcggtatttttttttcggtttttcgttttgttcgtatttttattacgttttttgtaagtatttttttttttttaatttttgtttttttttttttttaaagagtatatttcggtagtaatagtgattgaggtttgcggtgtataaagtattgtattaggtacggtggatagagttttggtgtttttttagtttttttatatttatatttagtatttttcggttttttcgtgtaaatattttatttttttttttatttttgatattcgtttttagtttcggaggtcgttttttcgttttcgttattttcgttattatttttttttaattttttaatttatttttcgcgttttgtttttttacgttttttagttagttttagcgtttttttcggtttcggttggttttttggttatttttagtttcgttacggttcgtttttttcggggttaggtcgttatcgtcgcgcgtttttttcgcgcgtcgttttttttttttttttcgttttttttcgggttcgggtttgttaggtcgagcgttttatcgcgggcgggcgtcgagtcgcgcggttatcgattgtaggcggcggtagttttaatttttttaggggttttgagaggaggggaaggggggaggggggagaatttttgttgtggtagtttcggtaatagtttttatttttgcgtttttttttttttttttttttttttttttttttttttttttttttttttttttttttttttagagtagtagagacgtagatatgtcgtagttagagcgtcgtcgcggtcgtcgttattgtcggttcggtgtattgtgggaagtttcgtatacgggaagcgtttcgcggcgttcgttttcgtttggcgtagagatttggttggaaagatatagcgtggtttcgatttcggcgtttgcgtgttattagtttagggtggtcgtggaagttggattcgagtcgtaggttttttaggttgggtttgggaggaaagcggtttgaaaaagatcggaattgaggaatttttttagagcgggggattttttgtttttatagttttaattaatgtttagcgtttggaaagtggaggattcggggattcgggagcgttttaggtttggggaaatggaagggtcggggatttaggtgaaaggttatttgttagaaatgttttggtttttttatttattttgttttatttagtttttcgtcgttatttttagtcgttggttttttattatttttaaatgttatttttttcggaagatgtagttttgcgtttttgaaattggtaaattttattagtgtttgtaagttgagatgtagggtgtgggtatagatatagattaagagattcggttttggatttttttgggtagaattttgttttttttattttatttgaagtttaaattttgtatggtaaagatttggtaatgatttttatagagttaggattatatagttgttttattttttgggggttttttagttaaattgtgatttttttaatggtgttttcgttagttaatattaggcgttttgaggtgtttttgtatattgttatcgtttataattatttatttttgtgtatatattttagtataaggttagttatataatataaaagatgtttagtgaatgttgagtaattgtgagtatttggaatttgtcgtgggataaaacgcgtttattgggatttttttataataatatgaagattttatttagcgtttttttgtaatatttaaacgtaatttttgaggggagagggaaaagaaaaggtatgaaaatatttatagagttatttttggtgtttttttttttttttttatattcgtttttttattttttgttaattaaatgtttatttgaatagtgttttttggtaaaattttaaatttttgtattatgtatttgtgatgatattgaattagattagtgtttgtaaggttaatgtttttttaggtattaattttagtaaatcgtgatgtttgtttagaaatagttaaggtttagaggtttagtttaatttagatataggtaattaagagtaagagtaaattatagttttataattaattttttttgtgtgttttttttattaaaaaatataaattttaataagatgatcgtatatattttgaatgttaattgtaataaaataatgatataagttagagttaagggatagttatttggaggatagttttttggtaatttttagtattcgtagtggtattaaatttagacgttataatgaaaaatatttttggtagtaagaaagtcgatttttagtattaggtagtgggaaaattaataattgaaaagggtttaaggtttggaggttatatttaatgggttaggattgattggtttgttattaggaatagatttagttttttgtttagtagtttaataagcgatagagaaatagttgtttaaaatgggtagaacgaagagtattatagggatagtaatagtaaaagcgatggtgaggagtaagtttaggttttttataagttaaattggaaaaattttttagttttaggttggttttttatgttttttttgtttatttttttaaatattattcgtaggtatttagtttatttatttttttttttttttttttttaattttttattttgaaataattatagatttataagaagttgtaaaaatagtttagagttttatgttttttttaatggtgatattttataaagttttagtaagatattaaaattagtgttaatttaaataatagagaggttttttaaaagaaaataatgtttatttgggaatagagtattgtaatgaaaatatatatattatagttaatcgtatatttagggatgtaaaggaagataaaggtgtttaaaggaaaaaatggaaaggattatataattgttttgaaataattatttttgattataaagattaataataagggtgacgttagttcgaggttggataggtatttgttggggagatgtttttgtagaagtatttttttatgtaaggttgtgatggtttttgtgtaaggttgtgggttttgtagtttttttttgatagtttttgttattaggtatataaatgtaagaatttttttttcgtaggtagttttttttagttttgtttgttagggttttttaatattagtaattttattttgattgtgataatttttatattaggaaatcgataatagtatattattgtttattatagattttagaatttattatttgttatttttttaatttgtgttttgttttgtgtgtgtgtgtgtgtgtgtgtgtgtgtgtgtgtggtttaatgtaattttattttatttatagatttttgtaattatttttataatgaagatatagaattgttttattattataaaagaatttttttatattattttttggtatttataaattttttttcgtattgtaatcgtttatttaattttatgtttgttttttagtaattattaaattattttttatttttatatttttattattttaaaaatgttatttaagtggaattatatagtatgtaaatttttgagattgatgttttaatttaaatataaaggtttatagtttaagtaaatttaaagggtatagatatttttagttgatggtttttaagggggaatgtaatatttaggaaattaagagaagttaggaatttgagttttggggtgaaattttataaatattaaatgttgataatttattttgtttttttttaagaatataaaagtatgttagataaaatatgtttgtgggttagattaagtttatagttttcggtatattttttttgatgtgatttaatttatagaggttggtatcgttgttttgataggtgagatttttagggatttttaaggtttttttttttttttttggttttggaattagttttgaggtttggtttttgtattttttttaggagaagaatgtatttttattttttttttgttttattaggtttttagatttttttttagtaatttttttttttttttttttttagtatttttagatttaagattagatggaagttttgttttttttatttttatggttttttgtagtattagttattcgttaaagttggttttattttaaggataaatttgtttttttttttgtaaaattttaaatttatagttttgttatagattaatttataagaatttgtttttattgcgttatttttattgtatttagaaaaatatggttttttttgtttttaaaggagttttttttttgggatattttgggattttttgaatttttgttttagatatgttttaggtttggggaaatggaagggttggggatttaggtgaaaggttatttgttagaaattttttagtttttttgtttatttttttttatttagtttttcgttggagggtaaagggtattttagatagttgatatattttaaaattaatgaatagtttattgttttttgttgaggatatagagtggaggtaattttttgagtttgagataaaaaattttgtattttttagaaatatttaaagaaggtattaggttgtattaaagtttattagttgtgagataattatggtttagaggggtataagggaagatattattgaaaggttaagatatataagaatgaatgaaaatgaggttttgggttaggatgatatttgtgggtaaggaaaaaataaataatatgaggataatatttattagtgtttagaggttagtttggtgattaagtttatagattttgtagttgaagttagggtttgaattttgattttattatttattggttttgtaattttaagttatttaatttttttgtgttgttaagtgttttatttagtaaatggagttaagaatagtattttttttttagggatattatggttattaaatattaatatagagtagtttagtgtttgtttatttatttatttattttagagataaggtttttgttgtttaggttggaaggtagtggtataattatagtttattgtagttttaaatttttaggtttaagtgatttttttattttagttttttgagtatttgggattataagtgtgtattattatgtttggttgatttttgtatttttgtagtaataggatttggtagtattgtttaggttgattttaaagttttggttttaaagcgagttttttagttcggtttttttaaatattgggattataggtatgaattattatatttggtaatgtaaagtagttagaataataattgatatatagttaaatgttttatgtggtgttgatattgtagttgttattattattatttaaaataatttaaaggtaatattgaattaaattttttaaaaataaaatttaatagagaaaagatattagtttttataagtggattggggtgaggaaaagaagagaaattatataaggataaaaaaaaaaaaaaaagaatatgttgagagaggtgatttaggtgggaaaatattttttagaatgttttttatggggaataaaaagggtatgtaataggtagatggtattaggaaaaaaaattaatttgtaaaaaaaaattgttattttttagatattttatttttgagtataatttttgttttaataattttataaggttgatgatattggtttattttaaggatgtttgttattttttattcg

SEQ ID NO: 237 - DNA, 7895 bp, Artificial Sequence
  chemically treated genomic DNA (Homo sapiens)
ttttatatattatttagttttgggtatgtttttattagtagcgtgagaatagattaaaataatatattttgatatatttattatttttatttatttatttatttatttatttatttatttatttatttattttgagatagtattttgttttgtcgtttaggttgaagtgtagtgtcgtaattttggtttattgtaatttttatttttcgggtttaagagatttttttgttttagtttttcgagtagttgggattatagatatatattattacgtttagttaatttttgtatttttagtagagatagagttttattatgttggttaggttgatttcgaatttttgattttaagcgatttattcgttttagttttttaaagtgttgggattatatgtgtgagttattatgttcggttttatttgtattttagatataataattgatgagtattaaagttaaaatagagataataagattgatagaatagattgtggtaataatattttaaattatagataggatttaaggttgtgttacgtaagggtttagtcgtgtatttttattttaaaaaataaattatgtttaattgttataaggtttttttttttttttagtagttaaacgattatttgtttcgagataaatagtattaagataattacgatttatttagtttatagaggttaattggaatttttgttttattagtcgtaattatagttttggataaagaaggtgatttcgataattttttttagttaagaagattattaattagggattggttttggatagtttatagaggttgtgtatttgaatgtttttgtgttttgaaaagattttttgatatatagggtttaattgtaatatatttatttaaaattttttttagagatagggttttggtttgttatttaggttggaatgtagtggtataattatagtttattgtagtttcgaatttttgggttgaagtgatttttttgttttagttttttaagtagttgggattataggtatgtattattatatttagttaagtttttatttttagtagagatgagggggagttttattatgttgtttaggtttgtttttaatttttagttttaagcgatttttttgttttggttttttaaagtgttgggattataggtatgagttattatatttggtttgtaatatatttaaatgttaagtttaaatattagtttaatttaaagtaaatatgggttatatattattatttatgtaataaatttgtattttttgtatatgtatttttgaatttaaaataaaagttgaagagaaagaataaatttttaagaggatagtttttatattaagtttttttattatgatttaaaaaaaatttttttaagaaatggggaagtatggaattaaaaaggggtttgtatatttaaagtaaaattaagtaaaaagaataaatttgggagtattatattatttaattttaaattatattataaggttatagtcgttaaaatagtacggtattggaataaaataggtatatagattaaacgaatagaatagagaatttagaaataaagttaaatatttatatttaatggatttttaataaagtaaataaaaatataaaggggggaggggtattttatttagtaaatggtattgggataattggtaagttatacgtagaagaatgaaattgtatttttattttttattttatataaatattaatttaagatagattaaagattgaaatttaagatttgaaattataaaaattttagaagataatattggaaaaatttttttggatattggtttaggcgaagattttatgattaagaatttaaaagtaaatgtaataaaaatgaatataaataaatgggatttaattaaattaaaaagtttttgtatagtaaaataaataattagtagagtaaatagataatttatagagtgggagaaaatttttataaattatgtatttaataaagaattaatatttagaatttataaggaatttaaataaattagtaagaaaaaagtaaataattttattaaaaagttatatgttaaggatatgaatagataatttttatttttttttttttgagatagagttttatattgtcgtttaggttggagtgtagtggtataattttagtttattgtagttttaggattaagtaattttttttgttttagttttttgagtagtttggtattataggtgtttattacgatgttggttattttttttatttttatttttttgattttttagtagagacgaggtttcgttatgttgattaggttggtttcgaatttttgattttaggttatttgtttatttcggttttttaaagtgttgggattataggcgtgagttatcgcgttcggttcgatagtttttaaaagaagatatataaatggttaataaacgtgaaaaaatgtttaatattattaattattaggtaaatgtaaattaaaattataatgttatatttatttttgtatgaatggttataattaaaaatgaaaaaatgatagatgttgatatggttgtggtgaaaagggaatatttttgtattgttggtgggaatgtaaattagtataattattatggaaaataatatggatgttttttaaagaattaaaagtaaatttgttattagatttagtaattttattagcgggtatttatagagaggaaaataagttattatatgaaaaatatatttttatacgtatgtttgtagtagtatagtttataattgtaaatatatagaattattttaaatgtttattaatgtacgagtggataaagaaaatgtggtatatatatataatatggaatattatttagttataaaaaggaatgaaataatggtatttgtagtaatatggatggagttagagattattattttaaatgaagtaatttaggaatggaaaattaaatattatatgtttttatttttaggtgggagttaagttatgaggacgtaaaggtataagaatgatataatggattttgggaatttagggggaaaggtgggaggggtgagggataaaagattatattttgggttggttgggcgtagtggtttacgtttgtaattttagtattttgggaggtcgaggcgggcggattacgaggttaggatatttagattattttggttaatacggtgaaatttcgtttttattaaaaatataaaaaattagtcgggtatggtggcgggcgtttgtagttttagttattcgggaggttgagttaggagaatggcgtgaatttgggaggcggaatttgtagtgagtttagatggcgttattgtattttagtttgggtaatagagtaagattttattttaaaaaaaaaaaaaaaaaaaaaaaaaaagattatattttgggtagaatgtatattgtttaggttatgggttttttaaaattatagaaattattattaaagaatttatttatgtaattaaatattatgtgttttttaaaaattattgaaataaaaattaaaaatatagttaaaaagaacgggtgaagttagttagttgtgggtgtatatgtttgtagttttagttattggggaggttgaaatgggatgtttaagtttaggggttttagtttagtcgggtaatatagcgagattttatttaaaaaaaaaaaaaagaaagaaaagaaagacggtcgggtacggcggtttacgtttgtaattttagtattttgggaggttgaggtaggtggattacgaggttagaagatcgagattattttggttaatatggtgaaatttcgtttttattaaaaatataaaaaattagttaggtgttgtggcgggcgtttgtagttttagttattttggaggttgagataggagaatggcgtgaattcgggaggcggagtttgtagtgaatcgagatagcgttattgtattttagtttggaagatagagtgagattttgtttttaaaaaaaaaaaaaaaatttaaagataagaaggggtgaagttaattgttgggtttttttgtttttttagttattgtgaagataggagtgagttgttagattggtatatgttgtattttattgaaggttagtggatatgaatttttagggaatagtttttttattgtatattttttttagttgtgtttggttgtttgggagttaataaagagaaaaggtgtatttggatttatatagcgttggtatttttattaaatttatgtgataaaaaggtaagggggtaaaagagtttatagtagtggtaagagtgttgttaaaattatagattatggaaaatatgtaggtttagaagtaaataaaggagaaagtttttagattgtgagaaagtggagaagttagtggtttagagttattaaaaaggtagaagaggggttacggaggggttatgtaagtttgtagatatttttgtttttagatatttttatttacgtttaagataattagggaaggggataatgttcggtttagaaggtagaaaaatataattgggatttgtagttttgaagttataagtagatttatattttcggtttattatttataagatatgtgattatggatattgatttatattttttgagtttgtttttttttttttaaaattaggagaataatattattttataattggtgtgaggatttaaagagataatgtatgtaaagcgtttaatatagtgtttggtatatagtaagagttgaatatatgatgttattgttatatttggaagagaaattaaggtaggggtataatgaggataattttgagcgtcgaagtattgtaaggtggaatttttggatagttaggcgtatgcgtttgtttatgggcgtttttttagcgaggacgttgcgtatgcgtcggaagttgtagtcgggaagtttgcgaggtcggtttcgttcgattttaatatggcggcgttttttgtttgttttggagtgtcgttttcggttttttcgcggtcgtgatgtatttttttttgcggtggggttcgggatatggtaggtgagtgttaataatcgttcggggtcggggaagtttcgggagtcggggcggaggcggcggaggatggggcgcggtgggacgtcggtgacggttgtgtgggggaggggagggaagtggaatgggacgttaatcggggttgaggggatatcgttgggcgggagattgtggggtggcggggcggggggcgtcgtcgggcgtgttggcggggagtgggcggttaggcgatcgttcgggcgagggggcgcgtgttatttttcgggttggatgatattttagttggtagtattttcgttttcgtcgtacggttgttatcgttttttgatttcgcgcgttgtcgagggtgggcgttttgcggtcgcgagggagcgtagtgtcggggtagtttttgtcggtcggtcggggcgggagggagcggggttgttcgggtttaggaggagttgatagaggaggtcgacgttgtttttgtataaaagtattttatttatttattcgtattgcggacggtggtttagtatttgatagatggtgaagttagagcgagtgatgcgggcggattcgattttttaggattttcgattttggagttaggagtgtgaatcgtggagtttagtagcggggtttgaatttttattttttgttgtgattttaggtatttttggttttttttttttgtttgggtttatttattttttaagtagagatgataataaaattagttttttaagattgtaataaaggggaaatgaggtttttagaatatttatgggtataaagtaaatgttgtgtgtttgttgttgttattaattgtattattattgttatttagagtttagagatttatgtgggagatatataggtaaattagtaattttgatattgttgcgagggtagaaagtttttttttttttgaagtacggagtagagatatattatttagtttagggggaatttcgggaggtttttgttttttagaaagttaagatttaagggaagtttagcggagtgaggtaggaaaacgggtatttttagttaagggtgtagtttgtgagaaaatttattttcgtagagagaggagagagagattaggttaaataaagaagtagattgggtcgggttcgttgttttacgtttgtaattttagtattttgggaggtttaggcgggtagattatttgaggttaggagttcgagattagtttggttaatatggtgaaattttcgtttttattaaaaatataaaaattagtcggtcgtgtttgcgcgcgtttgtagttttagttgtttaggaggttgaggtatgagaatcgttcgaacgtaggaggcggaggttgtagtgagtcgaaacggcgttattgtattttagtttgggcgatagagcgagatttcgttttaaaaaagaaaaaaaaaaaaagtagtagtaagttgtggtttggttttaggggacgttgtaaatttagttaaggattttaaattttaggttaatgggaagttatttaagaattagatttgtggttaggtgcggtggtttattttgtaattttagtattttgggaggttaacgtgggatgattatttgagtttaggagtttgagataagtttgggtaatatggtaagattttatttttattaaaagaaaaaaaaaaaaaaaggaaaaaaaaaatagtcgggtatggtggagtatatttttggtggttttagttttttggaaggttgaggtgggaggatttttttatttttagtttgaaataaaagaattaggttttttttgtttttgtttttgttttttttttttgagattacgttttgttttgttatttaggttggagtgtagtggtagtataattatagtttattgtagttttgatttgaatttaagtgatttttttgttttagttttttaattagttgggattataggcgtgtattataatatttggttaattttttaaatttttagtagagatggggttttattatgttgtttagattggtttcgaatttttggttttaaatgattttttcgttttagttttttaaagtattgggattataggtatgtgtaattatgtttggttacgaattagatttgtggattaggaagattattttggttaagtgaagaatgtattaaagggagtgggtttgtaggttaattaagagtttgttagaataatttaagtgagaaataaaggtgtgagttaaaggtagagagtgaggagagatggttttagcgatagaattgatataatttggtgattagtttgatgagagttaggggtagggaggagttaggattattttagtttttgattgatgggtgttggatgttgttttatgtgatagggagtagtacggggagtagatttgggggagggtagatatgtttagttttgaatatgttggagttggatgtttgtaaaatatttaagtgtatttgtttagttagtagttattattattaaaggttattgaagttatgggaggggatgagtttatttagggtagggtatgtaatgagaaataaagtgtttaggatattttagagtagtgttaatgttgtagtaatgtttggatataaattttgtcgttttttttttttaatattgtgttttgttttttattgagttggagtttttgagagtagggtttgaggttgagtttgtgtatttttgtgttttagtgttagtatgttatttggtatagagtaggttatttatttagtatttttttgggttaggttttgtgttaagtattttgtatttgtttatgtttgatggatgtatgaaaaggtagttttgagggagtaggtattttttaggtttttattagattttttatttgtgtgttattgatttagg

SEQ ID NO: 238 - DNA, 7895 bp, Artificial Sequence
  chemically treated genomic DNA (Homo sapiens)
tttgaattaatgatatataagtggaaaatttgatgagaatttaaagggtatttgtttttttagagttgtttttttatgtatttattaaatatagataaatatagagtgtttagtatagagtttggtttaaggaagtgttgaataaatggtttgttttgtgttagatagtatgttgatattgggatataaagatgtatagatttagttttaggttttgtttttaagaattttagtttaataagagataggatataatgttaagaaggaaaaacgataaggtttgtatttaagtattattgtagtattggtattgttttgggatattttggatattttgttttttattgtatattttattttaggtgagtttatttttttttatgattttagtgatttttgatggtgataattattagttgaataggtgtatttgaatgttttataggtatttaattttaatatgtttaaaattaaatatatttgtttttttttagatttgtttttcgtattgttttttattatatggagtagtatttaatatttattagttaaaaattggggtgattttgatttttttttgtttttaatttttattaaattaattattaaattgtgttaattttatcgttaaaattatttttttttattttttgtttttaatttatatttttattttttatttggattattttagtaggtttttaattggtttataggtttattttttttgatatattttttatttagttagagtgatttttttaatttataaatttgattcgtggttaggtatggttgtatatgtttataattttagtattttgggaggttgaggcgggaggattatttgaggttaagagttcgagattagtttgggtaatatagtgagattttatttttattaaaaatttaaaaaattagttaggtgttatggtgtacgtttgtagttttagttagttgggaggttgaggtagaaggattatttgagtttagattaaggttgtagtgaattatgattatgttgttattgtattttagtttgggtgatagagtaagacgtagttttaaaaaaaaaaaataaaaataaaaataaaaaaaatttgatttttttattttaggttggaaataaaagaatttttttattttagttttttaagaagttgggattattagaggtgtattttattatgttcggttattttttttttttttttttttttttttttttttaataaagatggggttttgttatgttgtttaggtttgttttaaatttttgggtttaaatgattattttacgttggttttttaaagtgttagaattatagagtaagttatcgtatttggttatagatttgatttttaaatggttttttattaatttaaagtttaaagtttttaattaggtttataacgttttttaagattagattatagtttgttgttgtttttttttttttttttttttgagacggaatttcgttttgtcgtttaggttggagtgtagtggcgtcgtttcggtttattgtaattttcgttttttgcgttcgagcgatttttatattttagttttttgagtagttgggattataggcgcgcgtaagtacgatcggttaatttttgtatttttagtagagacgggggttttattatattggttaggttggtttcgaatttttgattttaagtgatttgttcgtttgggttttttaaagtgttgagattataagcgtgagataacgagttcggtttagtttgtttttttatttagtttgattttttttttttttttttacgaagatgagtttttttataaattatatttttaattgggaatattcgtttttttgttttatttcgttgagttttttttagattttagttttttgggggatagaagtttttcgggattttttttaggttgagtgatgtgtttttatttcgtgttttagaggaaggagggttttttgttttcgtagtagtattagaattgttgatttatttgtatgttttttatatgggtttttgagttttgggtgataatggtgatataattaataatagtaataaatatatagtatttattttgtatttataagtgttttaggagttttattttttttttattataattttaggaggttgattttattattatttttgtttaaaggatgaataaatttaggtagagagaaaaagttaaaagtgtttaaggttatagtagggaatggggatttaaatttcgttgttgggttttacggtttatatttttaattttaggatcgaggattttggaggatcgagttcgttcgtattattcgttttagttttattatttattaggtgttgaattatcgttcgtagtacgaatgaatgaatgaaatgtttttatatagggatagcgtcggttttttttgttagttttttttaggttcgggtagtttcgttttttttcgtttcggtcggtcgataggagttgtttcggtattgcgttttttcgcggtcgtagaacgtttattttcgatagcgcgcggggttaaggggcggtgatagtcgtgcggcgggggcggagatgttattagttggggtgttatttagttcgggaggtgatacgcgttttttcgttcgggcggtcgtttggtcgtttatttttcgttagtacgttcggcgacgtttttcgtttcgttattttataatttttcgtttagcggtgtttttttagtttcggttggcgttttattttatttttttttttttttttatataatcgttatcggcgttttatcgcgttttatttttcgtcgttttcgtttcggttttcgggattttttcggtttcgggcgattgttgatatttatttgttatgtttcggattttatcgtagagggaggtgtattacggtcgcgagaaggtcggggacggtattttagagtagataaagggcgtcgttatgttagagtcgggcggaatcgatttcgtaggtttttcggttgtaattttcggcgtatgcgtagcgttttcgttaggagagcgtttatagatagacgtatgcgtttagttatttaaaagttttattttatagtatttcggcgtttagagttgtttttattgtatttttgttttggttttttttttaaatataatagtaatattatgtgtttagtttttattgtgtgttaggtattgtgttaagcgttttatatgtattatttttttaaatttttatattaattataagatagtattatttttttaattttaaaaaagggaaaatagatttaaaaagtgtaaattaatgtttatggttatatattttgtaagtggtggatcggagatatgaatttatttgtggttttaaagttatagattttagttgtgtttttttattttttaaatcgaatattatttttttttttgattgttttggacgtgaataaaggtgtttgaaaataaaagtgtttgtagatttgtatggttttttcgtggttttttttttatttttttggtagttttaggttattgatttttttatttttttatagtttgagggtttttttttttgtttatttttaggtttgtatattttttataatttataattttaataatatttttgttattattgtaagtttttttgtttttttgtttttttgttatatggatttggtaagaatattaacgttgtgtgaatttaaatgtattttttttttttgttagtttttaaatagttaagtatagttgaagaaagtatgtagtggggagattgttttttagagatttatgtttattagtttttagtgggatgtaatatatgttaatttggtaatttatttttgtttttataatggttagagaaataaaaaagtttagtagttgattttatttttttttgtttttaggttttttttttttttttggagatagagttttattttgttttttaggttggagtgtagtggcgttgtttcggtttattgtaagtttcgtttttcgggtttacgttatttttttgttttagtttttagagtagttgggattataggcgttcgttataatatttggttaattttttgtatttttagtagagacggggttttattatgttagttaggatggtttcgattttttgatttcgtgatttatttgttttagttttttaaagtgttgggattataggcgtgagtcgtcgtgttcggtcgtttttttttttttttttttttttttttttagatggggtttcgttatgttgttcggttggattgaaatttttaggtttaagtattttattttaatttttttagtagttgagattataggtatgtgtatttataattggttaattttattcgttttttttaattatatttttaatttttattttagtagtttttggggaatatatggtgtttggttatatggataagttttttagtgatgatttttgtgattttgggggatttatgatttgaatagtgtatattttatttaaggtgtagtttttttttttttttttttttttttttttgagatggagttttgttttgttgtttaggttggagtgtagtggcgttatttgggtttattgtaagtttcgttttttaggtttacgttatttttttgatttagtttttcgagtagttgggattataggcgttcgttattatgttcggttaattttttgtatttttagtagagacggggttttatcgtgttagttaggatggtttggatgttttgatttcgtgattcgttcgtttcggttttttaaagtgttgggattgtaggcgtgagttattgcgtttagttaatttaaagtgtagttttttattttttattttttttatttttttttttgagtttttaaagtttattgtgttatttttatgtttttgcgtttttatagtttagtttttatttaaaagtgagagtatatgatatttggttttttatttttgagttattttatttagaataatggtttttagttttatttatgttgttgtaaatgttattattttatttttttttatggttgagtagtattttatgttatatatatatattatattttttttatttattcgtgtattgatgggtatttgagatggttttatatgtttgtaattgtgaattgtgttgttataaatatgcgtgtggaagtgtattttttatataatgatttatttttttttttgtagatattcgttagtgggattgttggatttaatggtagatttatttttagttttttaaggaatatttatattgttttttatagtggttgtgttagtttatatttttattagtagtgtaaaagtgttttttttttattataattatgttaatatttattatttttttatttttgattgtggttatttatgtaggagtaggtatggtattatggttttgatttgtatttgtttgatgattagtgatattgagtatttttttacgtttgttggttatttgtgtatttttttttaagaattgtcgggtcgggcgcggtggtttacgtttgtaattttagtattttgggaggtcgaagtgggtagatagtttgaggttaggagttcgagattagtttggttaatatggcgaaatttcgtttttattaaaaaattaaaaaaataaaaataaaaaaaatagttagtatcgtggtgggtatttgtagtattaagttatttaagaggttgaggtagggagaattgtttgattttgaggttgtagtgagttaagattgtgttattgtattttagtttgggcgatagtgtgagattttgttttaaaaaaaaaaaaataagaattgtttgtttatgtttttagtatgtgattttttaataggattatttgttttttttttgttgatttgtttgagttttttgtagattttgggtattagttttttgttggatgtatagtttgtgaaaatttttttttattttgtgggttgtttgtttattttgttgattatttattttgttgtgtagaaattttttagtttaattaggttttatttatttatatttatttttgttgtatttgtttttgggtttttagttataaagttttcgtttaagttaatgtttagaagagtttttttaatgttgttttttagaatttttgtggttttaggttttagattttagtttttgatttattttgagttgatatttgtataaggtgagagatgaggatatagttttatttttttacgtgtggtttgttaattattttagtattatttattgaatagggtgttttttttttttttatatttttgtttgttttgttgaagatttattggatataagtatttggttttatttttgggttttttattttgttcgtttggtttatgtatttattttattttagtatcgtgttgttttggcgattatagttttgtagtatagtttgaagttgggtaatgtgatgtttttagatttgttttttttgtttagttttgttttggatatgtaggtttttttttggttttatatttttttattttttaaaaaaattttttttaaattatagtaagaaaatttaatatgagagttgtttttttaagaatttgttttttttttttaatttttattttaagtttaaaggtatatgtgtaggaggtgtaggtttgttatataggtggtaatatatgatttatgtttattttaggttgaattaatgtttggatttaatatttaaatgtattataggttaggtgtggtggtttatgtttgtaattttagtattttgggaggttaaggtaggaggatcgtttgagattgggaattggagataagtttgggtaatataatgagatttttttttatttttattaaaaataaaagtttagttgggtatagtaatgtatatttgtaattttagttatttgggaggttgaggtaggaggattattttagtttaggagttcggggttgtagtgagttatgattgtgttattgtattttagtttgggtgataaattaagattttgtttttaaaaaaaattttaaataaatgtattataattaggttttatatgttaaaaggtttttttagggtataaaagtatttaagtgtatagtttttgtaaattgtttaggattagtttttggttggtggtttttttagttggagaaagttatcgaaattattttttttgtttaaagttgtagttacggttggtggaataggagttttagttggtttttgtgagttgaatgagtcgtaattgttttaatattgtttatttcgaggtaagtagtcgtttagttgttagagaaaaagaaaaattttgtggtaattgaatatagtttattttttaaggtaggagtgtacggttgaatttttgcgtggtatagttttaggttttgtttataatttgggatgttattgttatagtttgttttgttagttttattgtttttattttaattttaatgtttattagttgttatgtttaaaatataaatagggtcgggtatggtggtttatatatgtaattttagtattttgggaggttgaggcggatggatcgtttgaggttaggagttcgagattagtttggttaatatggtgaaattttgtttttattaaaaatataaaaattagttgggcgtggtggtgtgtgtttgtaattttagttattcgggaggttgaggtaggagaattttttgaattcgggaggtggaggttgtagtgagttaagattgcggtattgtattttagtttgggcgatagagtaagatgttgttttaaaataaataaataaataaataaataaatagatagatagatagataaaagtaataagtatattaaggtgtgttgttttagtttgtttttacgttgttaataaaggtatatttaagattgggtaatgtgtaaag

SEQ ID NO: 239 - DNA, 9238 bp, Artificial Sequence
  chemically treated genomic DNA (Homo sapiens)
gtttttaataggattgttttaatatgatattaatgttaaaggttgtataaataagttgatttttaattttatttttaatgtttgttgtattttggtgtattgaatattaatttttttttaaatagttttttgatgatgaggatttgtgtggtattaattttaattataatatgtttagattatagtttttagttatttaattaaatagtaatatatatatatatatatatatatatatggaaggtattttgtagatatttagtttataattagttggttttgagtagggatattatgtgagataatgttagtgggtttgatgaattatttgaaattatttaaaagtagagttgaagtttttttgaaaaaagaaattgtattttttagtagtatttttttttcgtgggttagtgttttatttgagttattttggggtatagttatatgttttttgtagttgtttagttagttttatagtggtataagaaagttttttgtaataaattatttgtatatgttatattgattttgttatttcgttttaacgttgattaaaagatattttgttttagaagtggttttagaggaagagaattttaagaatgagttttttaaattaattttgtgtttttttaaattggattttttattttttttagtttaaaggtattattgattttatttttagtggaaaatagggtattggttgttaaagttacgatatggtgataaatatatgttaaatatattggataattttaagtatatatttatagaaggtatgattttagatgattatgaatttgttagtttcggatataatagttaaacgaaggattatagtggtatttattagttgttttgatttgtgttttagaaagtgggaaagaaaaagatgaggataaggtattaaattttagtttaattagaataatttgaaagcgttagttattatgtatggttttttaattttgtgttgttgattttggtatttatagtaaataatttgataggaaatttattatattgttattttatttgtataggtaggaggatttttttgtaagtaaatagaaatttaattggaattatttaatagaattatattttttaaattaattttaagataagtttagtttataaatttataattgttttaataaacgggaggttagttttgtattaggatggattttggtacgttgtagagtgttttataaggttttatagttattaattcgtgtgattatgtatttaaaaggagaaatatttaaatattttggtaacgattaatttttattattaaatggtacgtttatattttgatgattgggtttggtgagaaggaagtaggaaggaatttaggtatatttgtaagatatatatatattagagggaagaaataaattttataataatttatgggttttttattttggtgaaatttttataagtttattgatgtaggtttattgagttattttttttgggtgtagggtaagtagaatatagttttttttacgattaaaaaatagcgttataacgtttagtggattattggggttattgtatgttatttattttttattgaggcgtgttattttgtttattttgtgtgatttgaaaatattttggtttatttaagataagtttgtgtaatgtgttttagttgttatgtaagtttttttgttattaggattttatgatttagaaaagttaaaagtgattaaaatgttaatgaaagatagtgatggttgagtttttggttggttttagttagtaaattagtattttataaggttgaggtgggagaatcgtttgagtttaggattttaagataagttttggtaatatagtaagattttgttttaaaaaaaaaaattgaggcgaatagattaaaaatttaatataaaaatgggtaatagatttgaataatttataaaaagaaaaataatattgatataggaaatatgtaaaaatgttttatgttatttaaaaaataagaaatataaattaaaattaaatttaaatatattttttattatttgattggtaaaattttaaaaatgttgtaataatatattttgttagttagttttaaggtaagagtatatttatatattatttttgtaaatggaaatggtattaaaaaattaaggtaatttgataatatgtaataaaatttttattaatatttttattttttaattttgttttttgggatgtatttttttgatgtatttttaatagggataatatataaatgtataagtgtatttataatagtattatttgtaataataaaatattggaagttattgaaatgtttataaattgtagtattgttatataaattatttaatggaatttatgtagttttaaaaataaattattttatatgatatgatttttaagatgttattatgtgaatatagaagaattagaagtgtattattttaatatttaagtaaaaaggaaaaataagaaatatatttattttgttaaaaaaaagtggtaatgaaaataataaaattagttatataaaggtgttaggtggtaatattgtggaattggtttaggggtaggaaggaggggagtggtatttttttgagaataatatgtggtagagtattgatttatgggaatatgttgatgattgatatatttaataatataaaattaagaatgagatttttttgtagataaattaggaaagtgaaaattatagaataataaattaatttaaatgtattttaaattaataatataaatagtttaaaggtgatagtaagaagtaatttaagtaatttattaaatagtatagtgtttgattatatatttttagtttaaagataaaaagaattataaaaaatgttgaattttatttttgtattgttttttataatgatatgaattagtaattttgatattgtatgatgcgtatgtaatggttttaatgtttgtggtttattaaaatttatatattgtaatttttatttttaatgtgatggtaataggaggtggggtttttggagggtgattaggttacgggatgaatatttttataaaaaatgttagaaggagtttgtttgttattttaattaaatgaagatatagtaatatggtgttaattatgaataagaaagtggttaattatttgatataaaatttgttagtgttttgattttggattttagtttttagatttgtgaagaatagatttttgttgtttaaaagtcggtcgggcgtggtcgtttacgtttgtaattttagtattttgggaggtcgaggtgggcggattataaggttagatcgagattattttggttaatacggtgaaattttttttttattaaaaatataaaaaaattagtcgggtatggtggcgagtatttgtagttttagttattcgggaggttgagatagaagaatggtatgaatttgggaggtagagtttgtagtgagtcgagatcgtgttattgtattttagtttgggcgatagagtaagatttcgttttaaaaataaaataaaataaaataaaataaaataaaataaaataaaataaaagttaggtaggttatgatattttgtgattaaaaaatattggtattgagaggtgggtttgttgttgtaataaatatttaaaaatgtagtagtttttggaattatgtaatggatagaggttagaagagtttttatatgtatgttaggaaaagtttatattgttatgaatggattgataaggataattttggttagcgtttagaaatagagaataagaattgtagagaaaatattaattttgttagagtatatttaggtagttatgattagaatgttggtagaaatatggatagtaaaggttattttgaagattttagttagaaatgttgaatatgttattggaagagaagagagttttttgttataaagggataaagaatttggttgaattatatttaggtgttagtgttttatggaaggtagaatttgtgaatgatataattgtttatttgaattaatttttaattaaagtgttgaagttgtttgaattattttgattattcgtagtgaaaggtacgaagtgaggaatgattgaaataattattaattaaaagggaaatagaattaaaatttttaaaagtttatagtttatttattttggaaaaaaaaaaaaataggaaatttgaagaatataagggtatggttaagtaattaattaatttatgaatttagtatggattggttatgttaattgaagttaggatttattgtttaagataatggaagaatgattttaaaggtattttatagattatggtagtttttttttttattataggtttagagtgtaaggatttgggggatagaaagggtttttgatgttagatatattttaatatattaggtatagttttttgtttattacgattgagcgtgttaataaatttttattttttgggagggtagaatagagtaaggatatagttgtaattggtttagaaatagtagttatttagtttttagagaagtgttttttatattgtggttggtatagttattttatttaaagaaaattatgaaaagtatttttttttagtttagaaaaattgatatagaatatgagattttatttttttaaaataaaaatataggttgataggttagaatttataggtttatttgtttgagttaaaatttttacgtttttatagggtaaatggattttattttttaagatattagcgaaacgtttgcgggagtttaattgttcggtcgatgcgtaggaaatttggttttcgtaggcgtttcgcgagtattttgggaggcgtgggaattttggtttaggtaggaggatttgtgaattttgggaagtggagtttatttgttttgtggagtcgtgggaattttggtttaggtaggcggattcgggggattttgggaagtgtagtttagacgtttgtggtattatcgatattttcggttttcgagtaggatattgttatttaataaggtggtttgagttaagtatgtgttttgcgggtttttgcgaaagtgaattagttattaggggcgtttaacgatttggggggttaattaagggggtaagaagttttggagaagatttgaggtttggagatgcgaggggtgggaggggagtttcgttgtcgtcgatggagttttttggcgttgggggttgtatttaggtttatcggaggagtcgtcgggggttcgggggggcggggaagaattttgtttagttttgtgtgtttgtttagagggttttttaggtgtttgatttcgtttagttcgtttttttttatttttaagtgtgcgatttttttttcgcgatataacgtggggtgttatttaatttttttgtattttttattgtcgttttttaaatgaggattttaggattattttgatagaattgttttaggagttgaaagttgtggtataaaataaagatttaatagtttttgttatttggtgttttgttaatttttcgcgaagtggttaggtgttcgggtggggttagagttttagttgtttcggttttttttttggagttcggtagggttttggatgatttcggacgtttttgatttttttttaggaaggcgtgggttgtatttacgttttacgaagggagaggagtatttaatttgtattcgggacggcgacgtagagtgtttgatagttttttttttttttagtttgatttttttaaaagagttgtagggagggatttggttattgaggataaagttgtttatacgagtggtttttggtttttttttttttaaaaaaaagttatttattttgttagtttgtttttattattgttattatttgagaatgaggtttgttttgttttttaggttggagtgtagtagtggcgcgattttggtttattgtaattttcgttttttgggtttaagcgattttttgtttttagtttcggagtagttgggattataggtatgcgttattatgttcggttaatttttgtatttttagtagagacggggttttattatgttggttaggttggtttcgaatttgtggttttaagtgattcgtttgtttcggttttttaaagtgttggaattataggtgtgagttatcgcgtcgggtcggtttttttttttatagagatgtttattttaattaagagtgtataggatgtgtttttgggtatgggtgttgataataattaaattttaattggtaatttaattttaagggttttatggaaataaatatatttacgttatattatggttttgtggaaaggtattgtttttttttttttttttttttttttttttttttttgagacggagtttcgttttgtcgtttaggttagagtgtagtggcgcgatttgggtttagtgtaataggtcgttttttaggtttaggcgatttttttgttttagttttttaagtagttgggattataggtgcgtattattacgtttagttaatttttgtatttttagtaaagatggggttttatcgttttggttaggttggtttgaaatttttgatttcgtgattcgatcgttttggttttcgaaaatgttgggattataggcgtgagttatcgcgttcggtcgtttttttttattttaaatatgggagtgagacgtttggtgtttagttttcggtagaatgaggtatagttggagttggaatttaggtagtttgggttagagtttgagttgattattttttggatatatttttattgaggtagaggaattagttggaattaggtggggaaagagagttaggatttgattgaagggattttgagagtaaggtttatagatttggatttttgtaggagttttttaaaaatttgttaatattttgttttattttttataaggattttgtattgtggaattatattattgtggagtattttaaaattagattaataggaggagaaaatatgttttaaattatttatgaatttaagatgtgaaggtgttaattgtttgatataagagatggaatttttagttttttttcgtttttttttagtttttttttgtgtttattgtatatttatttataagtatttaaaaaaattgttataatattttaatgtgtttttttatatttttttaattatggaaatttttaaatattgttaatagagaataaattagtaaattgttatattatgttatgtttatttaatattatttttatttgtttttttttttttttttagacggagtttcgttttgttatttaggttggagtgtagtggtgcgatttcggtttattgtgagtttcgtttttcgggtttatattatttttttgttttagttttttgagtagttgggattataggtgtcggttattacgttcggttatttttttgtatatttagtagagacgaggttttattgtgttagttaggatggtttcgattttttgattttgtgattcgtttatttcggttttttaaagtgttgagattataggtgtgagttacggcgtttagtttttattgttattatttttatgattattttttgatagttgaaaattttttatttttatattattttaaagttatagaagagttgtaaaaatagtataaggaatttttatatattttttatttaaatttgtcgattgtttatattttttttgtttgttttgttggtgttattagttaaatattattaggaatatatttgtaattagagacgattgtagatttttgtagtaaggaagtttatattttatggtgattatggggtgatttggtaagaggtgtttagaaagggtaggttatagggttttatataatatgttagataatattaagatattatattaaatgatatttattaaatattagatatttgtttaaaaaattattaattgtgtttatagtgttataattagatagtgttagatagtatattttataatattatgttattttatatgtggttttataattaaatttgtttaatttttttatttatagtttttataattattttttattttattttttattttgattttagtttaaagtttaattatatgtattgtgtttattcgttatatttttgttttttttaatttggaaggattttatagtttttttttttaatatatgtggtatttttaaagagtgtaggtaagttattttggagaaagacgtttattgggatttatttgatatattttatgtttaggtttagattatgtattgttattgtttttgggttttatgtattgttggtgcggatattgttaaagtgataaggttttttttttattgtaatataatagggttaaacgatgttggtttggttttttattggtgattttaattttatttatttggttaagatgatgttttttagatttgtttattattaaattatttttttaaaagaaatagttaagttttttttggggagatatattattaatgggtatttattttaaaaatgaattgttagtttttttttatttatttattagtttttttaattataaatattttattaatatggatttagttttgttaagttaaatgatatgtaaattaataattattttttttaattttattgaggtattttttacgtattatagtatttattaattttaggtgtataatttagtgatttttaggaattttatatagtggttttgttattattatgatttagtttagattatttttattttttaattggattttttgtgtttatttatagttaaaatttatttttaggtcgggtatagtggtttatgtttgtaattttagtattttgggaggttaaggtgggaggtatagtttgagtttaggagttggagattagtttggataatatagtaagattttattttttaaaaaataaaaatttatttttattttaaatttggagtaattattaatttatattttttttatatattattatttattttggatggtttatataaatgggatcgtataatttatgggttttgtgattggttttttttatttagtatgatgtttttaagttttggaaatattttttaaatttttaaataagattttatggtatggatatattattatttgtttatttatttatttagaggaaggtattttggttgtgtgtagtttgggtttattatgaataatgttgttgtgatcgtttatgggttaatttataatatatatttttttttttttgtaga

SEQ ID NO: 240 - DNA, 9238 bp, Artificial Sequence
  chemically treated genomic DNA (Homo sapiens)
tttgtagaaaaagagagatgtgtgttgtgaattagtttatgaacgattatagtagtattatttataataaatttaaattgtatataattaagatgtttttttttgggtaaatggataggtaaatagtggtgtatttatattatggaattttatttggaaatttaaaggatgtttttaaagtttggaaatattatgttaaatgaaagaagttaattataaaatttatggattatacgattttatttatatgaattatttagaatagataatggtatatagagagaatataagttagtggttgttttagatttgaggtgagaatgagtttttattttttaagagatggggttttgttatgttgtttaagttggtttttaatttttgagtttaagttatattttttattttggttttttaaagtgttgagattataggtatgagttattgtgttcggtttgaaaatgagttttaattgtaagtgggtataagaagtttagttaggggatgaaaatggtttaaattgaattatgatgatggtaaaattattatgtgaaatttttgaagattattgaattgtatatttgaaattggtgaatgttatgatacgtaaaaaatattttaatagaattggaaaaaataattgttagtttatatgttatttaatttaataagattgagtttatattgatagaatatttatagttgaagaaattaataaataaatgggggagaattggtagtttatttttagagtgaatgtttattaataatgtatttttttagaagaaatttgattattttttttaaaaaggtaatttgatagtggataaatttgaaagatattattttggttaaatgaatgaagttgagattattaatgaagggttaaattaatatcgtttggttttgttatgttataataggaaggaaattttattattttggtagtattcgtattaataatgtataaggtttagaagtaataataatgtatgatttgaatttaaatatgagatatattagataaattttaatgaacgtttttttttaaaataatttgtttatattttttaaaaatattatatatattaaagaaaaaggttgtgaaatttttttagattaaagaagatagaaatgtgacgagtaaatataatgtatataattagattttaaattggggttagggtaaagggtagggtagaagatagttgtgaggattataaatgaaaaaattgaataaatttaattatggaattatatatgagataatatgatgttatggaatatgttatttagtattatttaattataatattataagtataattagtagttttttaaatagatatttaatatttaataaatattatttaatatgatattttaatattgtttagtatgttatgtgagattttataatttgttttttttaaatattttttattaagttattttatgattattatggaatgtgggtttttttgttgtagaaatttataatcgtttttggttatagatatgtttttggtagtatttggttgatggtattaataaagtaaataggaaaaatgtaaataatcggtaaatttgggtaaagagtatatgagaattttttatattatttttgtaatttttttatagttttgaaatgatataaaaatgaaaggtttttaattattaggaaatagttataaggatgataataatgggggttgggcgtcgtggtttatatttgtaattttagtattttgggaggtcgaggtgggcggattataaggttaggagatcgagattattttggttaatatagtgaaatttcgtttttattaaatatataaaaaaatagtcgggcgtggtggtcggtatttgtagttttagttatttaggaggttggggtaggagaatggtgtgaattcgggaggcggagtttatagtgagtcgagatcgtattattgtattttagtttaggtgatagagcgagatttcgtttaaaaaaaaaaaaaaaaataaatgggaataatattggatgagtatgatataatatggtagtttattagtttattttttattagtagtatttaaaaatttttatagttaaagaaatatgggaaaatatattaagatattataataatttttttaaatgtttataaataaatatataatagatatagagaaagattaaaaagaaacggaggagaattggaagttttattttttgtattagatagttagtatttttatattttggatttatgggtaatttaaaatatgttttttttttttattaatttaattttaaaatgttttataatgatatggttttataatataaaatttttataaaaagtgaaataggatgttgataaatttttaaaagatttttatagaagtttaagtttatgagttttgtttttaaggtttttttaattaagttttaattttttttttttatttgattttagttagtttttttattttaatgaaaatgtatttaagggatgattaatttaggttttgatttaaattgtttaggttttagttttagttgtattttattttatcgggaattaagtattaggcgttttatttttatatttaaaatggaaaagagcgatcgggcgcggtggtttacgtttgtaattttagtattttcggaggttaaggcggtcggattacgaggttaggagttttagattagtttgattaaaacggtgaaattttatttttattaaaaatataaaaattagttgggcgtggtggtgcgtatttgtaattttagttatttaggaggttgaagtaggagaatcgtttgaatttgggaggcggtttattgtattgagtttagatcgcgttattgtattttagtttgggcgatagagcgagatttcgttttaggaaaaaaaaaaaaaaagaaaaaaagaaaaagagtaatatttttttatagagttatggtgtggcgtaaatgtatttatttttataaagtttttagaattaagttattaattaaggtttaattattattaatatttatgtttaaggatatattttatatatttttggttgaggtgaatatttttgtaaaagaaaaaatcggttcggcgcggtggtttatatttgtaattttagtattttgggaggtcgaggtaggcggattatttaggattataggttcgagattagtttggttaatatggtgaaatttcgtttttattaaaaatataaaaattagtcgggtatggtgacgtatgtttgtaattttagttatttcggagttgaggatagagaatcgtttgaatttaggaggcggaggttgtagtgagttaagatcgcgttattgttgtattttagtttgggagatagagtaaattttatttttaaataataataataataaaaatagattaataaaataaataatttttttttaaaaagagaaaagttaaagattattcgtgtagatagttttgtttttagtagttaagtttttttttgtagtttttttagaaaagttaggttggggaaggagaaagttgttaaatattttgcgtcgtcgtttcggatataagttaaatgttttttttttttcgtgaaacgtggatgtaatttacgtttttttaaaaagaggttagaggcgttcgggattatttagagttttgtcgggttttaagagaagggtcggagtagttggagttttgattttattcgggtatttgattatttcgcgggaaattaataggatattaagtgataggagttgttaagtttttgttttatattataatttttaatttttaaaataattttattaggatggttttaaaatttttatttaaaaaacggtaatgggaggtatagggagattaagtaatattttacgttatatcgcgagaaagaggtcgtatatttaagagtggagggaggcggattgaacgaggttaaatatttggaaaattttttaaataggtatataagattagatagagttttttttcgttttttcgaattttcgacgattttttcggtggatttgagtatagtttttaacgttagaaggttttatcgacggtaacgaaattttttttttatttttcgtatttttaaattttaggttttttttagggttttttatttttttagttgattttttaggtcgttaggcgtttttaataattggtttattttcgtaaagattcgtaagatatatatttggtttaaattattttgttaagtagtagtgttttgttcggagatcggaagtgtcgatgatgttataggcgtttggattatattttttagaatttttcgaattcgtttgtttgagttaaagtttttacgattttatagagtaaatggattttattttttagaatttataggtttttttgtttgggttaaaatttttacgttttttaagatattcgcgaaacgtttgcgggagttaaattttttgcgtatcgatcgggtaattagattttcgtaggcgtttcgttggtattttgggaaatggagtttatttgttttgtggaggcgtgagaattttggtttaggtaggtggatttgtgaattttggtttattaatttatatttttattttaaaaaaatggagttttatgttttatattaatttttttaaattaaaaaagaatattttttatggttttttttagataaagtgattgtgttaattatagtatgaggaatatttttttgaaaattgagtgattgttatttttaaattagttatagttgtatttttgttttgttttgtttttttaagagataaaaatttattgatacgtttaatcgtagtaggtaggaaattgtgtttaatatattagggtatatttggtattaaaggttttttttgttttttaggtttttgtattttgggtttgtgatgggaggagaagttgttataatttgtgaaatgtttttggggttatttttttattgttttggataataggttttggttttagttgatatggttaatttatattaaatttatgaattagttagttgtttaattatatttttgtattttttaggttttttgtttttttttttttttaaagtagataggttgtaaatttttaaaaattttagttttgttttttttttaattaataattattttagttattttttatttcgtgttttttattacgggtagttaagatgatttaagtaattttaatattttgattagaaattaatttagataaataattatattatttataaattttattttttataaaatattagtatttgaatataatttagttaaattttttgtttttttataataagaagttttttttttttttaataatatgtttaatatttttgattgaggtttttagaatggtttttattgtttatatttttattaatattttgattatgattatttaggtatgttttaataagattgatgttttttttatagtttttattttttatttttgagcgttaattagaattgtttttattagtttatttatggtaatgtaggttttttttagtatatatgtaaaaatttttttagtttttatttattatatagttttaaagattgttatatttttaggtatttgttgtagtagtaagtttattttttagtattaatattttttagttataaaatattatagtttgtttggtttttattttattttattttattttattttattttattttattttatttttgagacggagttttgttttgtcgtttaggttagagtgtagtggtacgatttcggtttattgtaagttttgttttttaggtttatgttatttttttgttttagtttttcgagtagttgggattataggtgttcgttattatgttcggttaatttttttgtatttttggtagagaagaggttttatcgtgttagttaggatggtttcgatttgattttgtgattcgtttatttcggttttttaaagtgttgggattataggcgtgagcgattacgttcggtcggtttttaagtaatagaaatttattttttatagatttggaaattgggatttaagattaaagtattggtagattttgtgttaggtagttggttatttttttgtttatagttagtattatattgttgtgtttttatttggttgaagtgataaataagttttttttggtattttttataagggtatttatttcgtgatttaattattttttaaaggttttattttttattattattatattgagggtaaaaattataatatatggattttggtgggttataaatattaagattattgtatacgtattatgtagtgttagaattattaatttatattattgtaaaaaataatgtaaaagtagagtttaatattttttatagttttttttgtttttagattgaggatatatagttaaatattgtattgtttaataagttgtttaaattattttttgttgttatttttagattgtttatgttattgatttgaaatatatttaggttaatttgttattttatgatttttatttttttagtttatttataaagaaattttatttttgattttatattattgggtatgttagttattaatatgtttttatgagttaatgttttattatatattatttttagagaagtgttattttttttttttttatttttaaattaattttatagtgttgttatttaatatttttatgtaattaattttattatttttattattatttttttttaatagaatagatgtgttttttattttttttttttatttaaatgttaggatagtatatttttaatttttttatatttatataataatattttggaaattatgttatatggagtaatttatttttaaaattgtataaattttattgagtggtttatataatagtgttgtaatttatggatattttagtgatttttaatattttattattataaatgatgttgttataaatatatttgtatatttgtatattatttttgttgaagatatattagaagagtatattttagaaagtaggattgaaaagtgaagatattaatagaaattttgttgtatattgttaagttgttttaattttttggtattatttttatttgtagaagtaatgtataaatatatttttgttttgaaattagttaataaaatgtgttattataatatttttaaagttttgttaattaaatggtaagaagtgtatttaaatttagttttaatttatattttttgttttttaaataatatagaatatttttgtatattttttgtgttaatattatttttttttttgtaaattgtttaaatttattatttatttttatgttgagtttttggtttgttcgttttaatttttttttttagaataaggttttgttatgttgttaaggtttgttttgaagttttgggtttaagcgatttttttattttagttttgtaaagtgttgatttattaattagggttagttaaaggtttaattattattattttttattaatattttaattatttttggtttttttgggttatagggttttgatggtagagaaatttatatagtagttgggatatattgtatagatttattttggatgagttaaaatgtttttaggttatataaaataggtaaagtagtacgttttaatgaggaataagtagtatataatagttttagtggtttattaggcgttgtgacgttattttttgatcgtaggaagggttatattttatttgttttatatttagaagggatagtttaataggtttatattagtgaatttgtggaaattttattaaggtgaaaggtttatgaattattataagatttattttttttttttggtatgtatgtattttataaatatgtttagatttttttttgttttttttttattaggtttaattattaaaatataaacgtgttatttgataataggagttagtcgttgttaagatgtttgaatatttttttttttgagtatatagttatacgggttaatggttgtagggttttgtgaagtattttgtaacgtattagggtttattttaatatagaattgatttttcgtttattgaagtaattgtggatttgtaaattggatttgttttagaattgatttgggagatgtgattttgttaggtaattttagttggatttttgtttatttgtaagagaatttttttgtttatataaataaagtaatagtgtaatagattttttgttaagttatttattatgaatgttaagattaataatataaggttaagaagttatgtataatgattgacgtttttaggttattttgattgagttggaatttgatgttttgtttttattttttttttttttattttttgaagtataaattagagtaattagtaaatattattatagtttttcgtttgattattatgttcgaaattaataaatttatagttatttagaattatgttttttataggtatatgtttgggattatttaatatatttggtatatatttattattatgtcgtggttttaataattaatgttttattttttattggaaataaagttaatagtgtttttaaattaaaaaagatgagaaatttaatttgagaaaatatagaattgatttagaaaatttatttttaagattttttttttttagaattatttttggaataaaatattttttggttagcgttgaaacggagtaataaaattaatatgatatatataaatgatttattgtaaggaatttttttatgttattgtgggattggttaagtaattgtaaaaaatatatggttatattttaggatggtttagatggaatattaatttacgagaggaagatgttattaaaaggtgtaatttttttttttaaagaagttttagttttatttttaaataattttaagtgatttattaggtttattgatattattttatataatatttttatttaaagttaattgattatgggttaaatatttataaaatgttttttatatatatatatatatatatatatgtattattgtttgattaaataattagggattgtagtttaggtatgttgtaattaaaattgatattatatagatttttattattagaaaattgtttaaggaaaaattaatatttagtatattaggatatagtaggtattagaaatgaggttggaggttaatttatttatatagtttttaatattagtgttatattaggataattttgttaggagt

SEQ ID NO: 241 - DNA, 6843 bp, Artificial Sequence
  chemically treated genomic DNA (Homo sapiens)
tagttttttttgagttttatttttcgttggttaaatgatgttattaataaggtaaatgattttgttgttaaatgttagtggaaattttttaatagttataattgttataaggtttgatgattttatagttattttgtttttaacggatgttataaaatgttcgaaaagttttttcggggttaatttattttattataattttttgagggagtattattgttaatgttttatgtggtttgtgtattatgaaatatttattattatttttgatggattttagcgtattttgttttatttgagtttgtttagtttttagagttaatagaggaattttagttattgattttagattttgattttatttaaaattaatagtagttaatttgtatttttttgggttatatattgttggttaaatatttagaattattgtgtgtttttgggtagagaatttatagtttaaaatattttttttgtttttttttggtatagggttttgttttgttatttaggttggagtgtagtagtatgattatagtttattgtagtttttattttttgggtttaagtgatttttttatttcggttttttaggagttgggattataggtataaattattatgtttaaatatatatatattttttaattttttatttttttttttttttttgttttggaagttatttagtaagttatatttgtttaattggatatgtatgtttatattttgttagaattaagtattttagagtataagtatgatagtaataaagttcgtaatattattattaagttatttattttagagattttatgatgaatttaaagttttttttattgcggattttggagatcggttaagtttaggagaaataatattaagatttagattgatttttttttttttaatttttttgtttttgagtaattattttttaaatttagaattatatttagggtaaaatataagtaagggttatttatttttttgttattgttttggtatttgtagataatatagtttatttaattttaggtttttatagttatgtatagttatatttcggagatatgtgagttcgtttttatagattattatagtaaagtgagttatataaattttttggttttttagtgtatataaaagttacgttggttgggtgaggtggttgttatttgtaattttagtgttttgagaagttgaggtaggaggattatttgagtttaggagtttgagattagtttgggtaattatagtaagattttatttttataaaaaaaatgttttatattagttaggtgtggtggagtagttgtagttttagttatttaggaggttgaggtaggtggattgtttgagtttaggagtttaaggttgtaataagttatgattgtgttattgtattttagtttgggtgatagagtaatattttgttttaaaaaaaaaaaaaaaaaaaaaaaaaaatgttgagcgtggtggtttatgtttataattttagtattttgggaggtcgaggtgggtggtggattatttgaggttaagagtttaagattagtttgtttaatatggtgaaattttattttttattaaaaatgtaaaaattagttaggtgtggtggagtatatttataattttagttatttgggaggttgaggtaggagaattatttgaacgtaggaggtggaggttgtagtgagttgagattgtgttatggtattttagtttaggtaatagagtaatattgtattttaaaaaaaaaaaaaaaattatagtttattgtgtgtagtagtattatgtttaaaaaataaaggatgtattttaattgtaaaatattttgtttaaaaattttgatagagaaataaagtgagtatgtgttattggaaaaatggtgttagtagattttattagtggttataaatttttaatttgtaataatttttaatttgtaataaaaataaaattttatacgttatttgtaaagtataataaaatgaagtatgttatatgttgatttttaggaattagaagaaaatgagagtattgttgttatcggaaataagaggattgttttgttaagttattgaaaaaaaaaaaaatttttatttttttgttaattgtaagaatggtaatatttgataagaaaaatttaatttgttaaatattacgatttttgtagttgataaaggaatgaaaagttaatagtatatgtgaggttggatacggtggtttatatttgtaattttaatattttgggaggttaagacgggtggattatttgaggttaggagttcgaggttaatttgattaatgtggtaaaagtttatttttattaaaaatataaaaattagttaggtatggtggtaggtatttataattttagttattggggaggttgagatatgagaataggttgaattcgggaggcggaggttgtagtgagttgagattgcgttattgtattttagtttgggtaatagagggtgatttcgttttagaaaaaaaaaaaaagtatatatgagtatttaataaggttataggttttgattttgagttttgaaaatttttaggtttagttttattgggaatttgtatttaaatatgtttttgttttggatttataggtggtataattttgttagtttttgatgtataaatggtgatagtattttttaataaaatttttaaagtagttttttaaaaaaataattttgaaaatttggttaatgataatataggattcggaagaaaatattatttattgaaattggaaagtttgtttttaatttggggtttgttttttttttttttaattgttttaagagattaaggattttagatataaatacgttataaagtgtttttagatttgtatgaatttattgtggtttagtataaataaatttttaatatgagtgttatagatgtttgtgagggtattttgggggtttttatattgtttattttaaatttgattgtagttagagttaatagggttttacgtaggtaaaggttatgttattaatttttaaatgagattcgtttaagcgggaaatgtatatttagtgtagtagttttaggttagttttttttagagttttaggttttgtttgttattttgaagatatttatgtgggtttttttagggtttttttttgttataaaaataaaatgattgtttttattaatgtttgcgtttatgggagaggaggtaggagtagtagtatttgttttgtgtgtgggagatatttgaagggtttagtgggaattgttagtagtagggaatagaataggtggtgagaagagttattttattgagtttttgggtttttgattttttgaaattttttttttttttatttaatttttttttttagaaaaaaaaaaaaataatttaaaaatggaattagtgtaattagtgaagtagttgtattttagtgaataagtagtttgtttttgtatttgtatgtatgtagttttggcgttttttttagaaaaaagagaggttttatttcgtgtatgaatataggtggaggttaagattagtattaataaaggttgtgtgtttgttatggagtttaggagggttaatagttattttatttttgttttcgattattatattttgtttttagaataaagttaagagtttttggttaatgaaagtgtgtaaatatttttatattttttttagtagtttttttttaggttgtaattatgtgttaaagaaaagaatttaattttttaaaatttttttttttttggatgtagattgaaatttttgttttaaatataatggttttaatgtttaaatttaatgttagtaattaatttttagtgttttaaggattttttgtttataggtagttattttatggagttggtttttgtgagaggtatagattgttaggaggggttgagattttttttaattaggatttttagttttgaatggttttagtgaataatattaataatgattttttggtcgggtatttacgtcggtaattttagtattttgggaggtttagacgggtggattatttgaggttaggagtttaagattagtttggttaatatggtgaaatttcgtttttattaaaaatataaaaattagtcgggtatggtggtagtcgtttgtaattttagttatttggtaggttgaggtaggagaattgtttgaatttgggaggcggaggttgtattgagtttatagtgcgttattgtattatagtttggatgataagtaaagtttaattttaaaataataatttttaaagtaatgattattttaattatttttaaatttttttgtttagtaggaattttatttatgggagtgtttggaaaagggataaagagcggttattgagatttttttaaagtttggatttgggatgtttgaatagtgaataattttaaagttatttaaaaattatttttttttttattatcggattgagttttttagttttaattttaaggttttaattatatagatgtgagttaaattttgttgggttaaataggattttttttgttggcggataattttaagtgtttatagagatttttcgtttttttttaaatatttggatttaattgtttaaattggagttcggattaaaatatttttgatttcgggggtttttttttggttaggaagaggggagggagtaattggatttttttttttttgcggttgtagagtttaatttttttttggggatatttgtttttttttttggggaagatagtacggattttagttttgtggatttttttatttagttttgagatttaagtaagttaattggtttgtgttttttattttattttaatgtaatgaataaagatagttttagttttcgttttaagggagtaggagtatttgcgatgtttcgtttttaagtttttagggcgaattcgttaaatgtgcgagttgggtagtttattttttttagttgttggtcggaagcggaagtgggcgttcgtcgtttcgttattttttatagttgtcgtttgtagttgagaaagggttgttgttttagtaggttaggtttaggtgcgttttattagtgaggtcggcggaatcgggagggaaggggttaagggtatagtgcgtagtttcggttgttttagattttgtttgtagtttttcgttttagttttcggttatcgcggcgtttttttttagaggtcgtcggttttggtttttttcggtattgttgggtttggggttgttatttcgggtattggttttcgggaggaggtaagtgggtttatgtggttagagtgcgtcggcggggttttttttttattttttgtatttttttttttaaacgtcgtttttagtaggagattatttttttttaagaaaatgtttttttggattttatttttcgttgttagaaggtatattttgggatgcgcgttattggtttgtggagatcgttttttttttttttttttgttatgtggatgtattttagtgtttgatatatatttgagtttttatttgagtgggtttgtgtatgttttttcgtatttgtggatttaggtttttaaggtttatttttgaaagttaagttgttgggttaaagtataaatgaatgtgtaatttttaggtatgattagatttttttttatgggatttgtgtttttttgagtttttagggtgtgttttgtatgtagtaagtagtagattttagtttttagtttatttgtagttttttttggatgtttatatattgatatatcgtttatgaataagaattttattttttttttataattttattacgatttatttttgttttataaatttattgttttgtttacgattttcgaaatattagaaggagtaatttttgttgttttttaggttttagaaagaaagtttttagtttgttattatttatatgtttgttatgtgtttttgatagattaaagatatttttttttgtaatagttttattgatataaaattatatattttattttatttaaagtgtataaattagtggtttttagtatattgagttgtgtaattatgattataatttaattttagaatatttttattgttttaaaagagaattttatatttattagtagttatttttttatggttggtaagtttttgggttttatttttgagtttttttatgttgttatatattaggttagattgatttaggtaaaaataatattttttatttaagaatatatagatgttttttttttttagtagtaagttaaggtttcggcggttttggaggataattgtagttagagttaatttgggtttggaggattgatgaagtttgtgatatgattgtgatgttagtagagaatttattagagagattatggaaggttttgatagaggttgaaatgtttgttattttagtatcgagagtaatagtggaggtagaaagttttaaattgataagggaattagtggaataattttttttgtcgtgtcggtgttatgaggggaatagggagttttttagttttatttgtaaattgtattttgagagtaaggaaaattagtgtgtatgtgtttgtttaattagtaggtagatatatgtaggtagaggatttatagaggaaaaagagattttgtgcgaggtaaaattggagatgtaaagtaaaaagatgaggagtgttgaaaggggtgttttgtatttagaattttagggatttagttagggcggtagtcgttagaggttgtaatggggattgatgaggtaattgcgtcgagggggaggttcgatttttatggtgtatgagaaaacgtcgagtatttataagtaattttttattgttatttttagg

SEQ ID NO: 242 - DNA, 6843 bp, Artificial Sequence
  chemically treated genomic DNA (Homo sapiens)
tttgaaaataatagtgaaaggttgtttgtagatattcgacgtttttttatatattatgaaaatcgaatttttttttcgacgtaattattttattagtttttattataatttttgacgattgtcgttttagttggatttttaggattttaagtataagatattttttttagtattttttatttttttattttgtatttttagttttgtttcgtataaggttttttttttttttgtggattttttatttatatgtgtttatttgttaattggataggtatatgtatattagttttttttatttttaaaatgtaatttgtaaataggattgaagagttttttgttttttttatgatatcgatacgataaaaagagttattttattaatttttttgttagtttaagattttttgtttttattattgttttcggtattggaatagtaggtattttaatttttgttaggattttttatagtttttttaatgaattttttgttagtattatagttatattataaattttattagttttttaggtttaagttgattttagttgtagttgttttttaaaatcgtcgaggttttgatttattgttggaaaaggagaatatttgtatatttttaaatgaagagtgttgtttttatttaaattaatttgatttggtgtatgataatataaaaaaatttaagaatagagtttaaaaatttgttaattatgggggagtaattgttgatgagtatgggatttttttttggggtaatgaaaatgttttagagttagattgtagttatggttgtataatttaatatattaaaaattattgatttatatattttaaatgagatgaaatatatgattttatgttaataaagttgttatagaagggaatgtttttaatttattaaaaatatatagtaaatatgtaagtagtgataagttgaaagttttttttttgagatttggaaggtagtaaggattgttttttttaatgtttcggaggtcgtaggtagggtagtaaatttgtagggtaggagtgggtcgtaataggattataaagggagaataaagtttttatttataaacgatatgttaatatgtaaatatttaaaagaaattataggtaaattgaaaattaaggtttgttgtttgttgtatataaaatatattttgagggtttaaaaaagtataagttttatagagggggatttggttatatttaggaattatatatttatttatgttttgatttaataatttgatttttaaaaataaattttgaagatttaagtttataaatacgaaaaaatatgtataagtttatttagataggaatttaaatgtgtattaggtattagggtgtatttatataatagaggggaaaaaaagggacgatttttataaattaataacgcgtattttaagatatgttttttaataacggaaagtgaggtttaagagagtatttttttgagaaaaaatagttttttattggggacgacgtttaaagagaagggtatagaaagtggagaaaaggtttcgtcgacgtattttgattatatgaatttatttgttttttttcgggaattaatgttcggaatggtagttttaagtttagtagtgtcgggaggaattaaagtcggcggtttttgagaagaaacgtcgcgatagtcggaggttggggcgggaagttgtaggtaaggtttggagtagtcggggttgcgtattgtgtttttgattttttttttttcgatttcgtcggttttattagtggggcgtatttggatttggtttgttgggatagtaatttttttttagttgtaggcgatagttatgggagatggcgaggcgacggacgtttattttcgttttcggttagtagttgaaaggggtgggttgtttagttcgtatatttggcggattcgttttgaggatttgggaacggggtatcgtaggtgtttttgtttttttagggcgaaggttgggattgtttttatttattgtattagagtaaaataagaggtataagttaattaatttgtttgggttttaaagttaagtaaaagagtttatagaattagaattcgtattgttttttttaagggaaaaagtaaatgtttttagaggaaaattggattttgtagtcgtagagggaaaggggtttaattgtttttttttttttttttgattaaaggaagattttcgaggttagagatgttttggttcggattttagtttaaataattaagtttaggtatttaaaaaaaaacggagggtttttgtgagtatttgaaattattcgttaataaaggagattttgtttggtttaatagggtttgatttatatttatatgattggaattttggaattaaaattgaaaagtttagttcggtggtagaaaaaaagatgatttttaaatggttttggagttatttattgtttagatattttaaatttaggttttaaaaaaattttaatagtcgttttttgttttttttttagatatttttatgaataagatttttattagatagaaggatttaagaatggttaagataattattattttaaaaattattgttttgagattgagttttgtttgttatttagattgtagtgtagtggcgtattgtgggtttagtgtaattttcgttttttaggtttaagtaatttttttgttttagtttattaagtagttgggattataggcggttgttattatgttcggttaatttttgtatttttagtagagacggggttttattatgttggttaggttggttttgaatttttgattttaagtgatttattcgtttaggttttttaaagtgttgggattatcggcgtgagtgttcggttagagaattattgttaatgttatttattagagttatttagaattaagaattttggttaaaggaaattttaattttttttggtagtttgtgttttttatagagattagttttataaaataattgtttataaatagaagatttttaaagtattagggattaattattaatattagatttagatattagggttattgtgtttaaaataaaaattttaatttatatttaaaaagggaaagattttaagaagttaggtttttttttttagtatatgattatagtttaaaaaggaattattaggggaagtgtgaggatatttatatatttttattgattaaggatttttggttttgttttggggataaagtgtgatggtcggaggtagaagtaaaatgattgttagtttttttgagttttatggtaaatatatagtttttgttaatgttggttttggtttttatttgtatttatgtacgaggtagaattttttttttttttagagaaaacgttaaggttgtatgtatgtagatgtaagggtaggttgtttgtttattggaatatagttattttattgattatattgattttatttttaaattatttttttttttttttggagagggaggttggatagaggagaaggaagttttagggagttaaaggtttagaaatttagtggaatgattttttttattatttgttttgttttttgttgttgataatttttattgagttttttaagtgttttttatatataggataagtattgttgtttttatttttttttttatggacgtaaatattggtgggagtaattattttatttttatggtaaagagaagttttgaggggatttatatggatgtttttaaggtgataggtagagtttgaggttttgaaaaaggttggtttaaaattattgtattagatgtgtatttttcgtttggacgaattttatttgagaattaatgatatagtttttgtttacgtggggttttgttggttttgattgtagttaggtttggggtaggtagtgtagaaatttttaagatatttttataggtatttgtaatatttatgttaggggtttatttatattaaattatagtaggtttatgtaaatttaaaaatattttatgacgtgtttgtgtttaaaatttttaattttttaaagtaattaaaaaaaaaaaaagtagattttaaattgaaaataggttttttaattttaatgggtagtattttttttcgagttttgtattattattggttagatttttagaattatttttttaaaagattattttaggaattttgttaaaggatattgttattatttatgtattaaaaattggtaaaattgtgttatttatggatttagagtagagatatgtttgaatataaatttttaatgaaattaaatttgggggtttttagggtttaaaattaaaatttatagttttgttaaatgtttatatatattttttttttttttttgagacggagttattttttgttgtttaggttggaatgtagtggcgtaattttagtttattgtaattttcgtttttcgggtttaatttgtttttatgttttagtttttttagtagttgggattataggtgtttgttattatgtttggttaatttttgtatttttagtagagatgggtttttgttatattggttaggttggtttcgaatttttgattttaggtgatttattcgttttggttttttaaagtgttgggattataggtgtgagttatcgtgtttagttttatatatgttattaattttttatttttttgttaattgtaagaatcgtagtatttgataagttgggttttttttgttaaatattattatttttgtagttgataaaggaatgaaagttttttttttttttagtagtttggtaaaataatttttttattttcgatgataataatatttttatttttttttaatttttgaaaattaatatgtaatatattttattttattgtgttttgtagataacgtgtggggttttatttttattataaattgaaggttattataaattgaaggtttgtggttattgatgaagtttattagtattatttttttaataatatatatttattttgtttttttgttagaatttttaagtaaagtattttataattaaggtgtattttttgttttttagatataatgttattgtatataatagattataattttttttttttttttaagatgtagtattgttttgttgtttaggttggagtgttatggtataattttaatttattgtagtttttattttttgcgtttaagtgatttttttgttttagttttttaagtagttgggattgtaggtgtgttttattatatttggttaatttttatatttttagtagagaatggggttttattatgttggataggttggttttgaatttttgattttaggtgatttattatttatttcggttttttaaagtgttgggattataggtatgaattattacgtttagtatttttttttttttttttttttttttttgagatagggtattattttgttatttaggttggaatgtagtggtataattatagtttattgtagttttgaatttttgggtttaagtaatttatttgttttagttttttgaatagttagaattatagttattttattatatttgattgatgtaaaatattttttttgtagagatggggttttgttatagttgtttaggttggttttaaatttttagatttaagtgatttttttattttagttttttaaagtattgggattataggtgatagttattttatttagttaacgtaatttttatatgtattaggaaattaaaaaatttgtatgatttattttattatgatggtttgtggaagcgaatttatatattttcgaggtatgattgtatataattgtgaaaatttgaaattaaataaattgtattgtttatagatgttaaaatagtggtaaaaaaataaatagtttttatttatattttattttgagtgtggttttgaatttgaagaatggttatttagaggtaaagagattggggaaaaaaagattagtttaaattttgatattattttttttagatttaatcggtttttagggttcgtaataggggagattttgggtttattatgggatttttaaagtaagtggtttaatgataatattgcgagttttattattattatgtttatattttgaaatatttgattttaataggatatggatatatatatttaattagatagatgtagtttgttgagtaatttttaaaataagagagaggaaagaaataggagattgaaaaatatatatatatttgggtatggtgatttgtgtttgtagttttagtttttgggaggtcgaggtgggaggattatttgaatttaggaggtggaggttgtagtaagttatgattatattattgtattttagtttgggtgatagagtaagattttgtattaaaggaaaataaaaaagatattttgaattgtgagttttttgtttagaggtatataataattttgaatatttggttaataatatataatttagaagaatgtaaattggttgttgttaattttggatgaggttaaagtttggaattagtaattagggtttttttgttaattttaaagattggatagatttaagtgaaataaggtgcgttggaatttattagagatggtggtggatattttatagtatatagattatataagatattaataatggtatttttttagggagttgtaatgaagtgagttgatttcgggaaagtttttcgggtattttatggtattcgttaagggtaaaataattgtgaggttattagattttgtgatagttatgattattagaaagtttttattggtatttagtaataaaattatttgttttattaatgatattatttaattaacggagaatgagatttaggaaaggtta

SEQ ID NO: 243 - DNA, 6167 bp, Artificial Sequence
  chemically treated genomic DNA (Homo sapiens)
  unsure (5129, 5159, 5211)
aaatttgtttatgatttgttttttttagagtaatattttttaaattatagtttgtaaattatgaaatgaatttggtgtgttgtaattattatttatttatttaaaaagaagggttaaaattgtatagattagatttaaatatattagaatggataatattaaaatgtatttaagatagtgaaagataattattttatgaattttgtgttttagttatatagttatgtatttagtaggcgtttgtatcgggtgttgatgtataatgtatattttagtggttgttatggttaaaaaaaagtttataagttattgatttaaaatgtattatttagtgttatgtttaatttttttttttttttttttttagacggagttttattttgtcgtttaggttggagtgcggtggtataatttcggtttattgtaagtttcgtttttcgggtttacgttatttttttgttttagttttttaagtagttgggattataggcgtttattattatgtttggttaattttttgtatttttagtagagacggggttttatcgtggtttcgattttttgattttgtgattcgttcgtttcggttttttaaagtgttgggattataggtatgagttatcgcgtttggtttgtttaaaattttttaagatgatatgtttaagagttaaaatttaagaatgaagagaaagttatttagagaggttgtataatgaggtggttaatagtatggattttggagttaagaattttagggttaaggaattttattttttttttataataataaagtaaaattatggatttttggttgttataatattaaatattatttagtataagtaaattataaatgttaatttaaaattaataatttttatttaaaatttttatttttgaattttatgagaagtattttatttaggagtattatgtttatatattaataagtaatattaaatttgttttagtttttgtttttttttttatagaaaattttttttagtgtttttattgttaaaatattgttgttttttttttttttttgagatagggttttattttttgtttaggttggagtgtagtgatataattttagtttaatataatttttgtttgtcgggtttaagtaatttttttattttagttttttgagtagttgggattataagtatgtattacgttgttcggttagtttttgtattttttggtagagatggggttttattatgttggttaggatggttttaaattttcgattttaagtgatttatttgttttggttttttaaagtgttgggattatagatatgagttattgcgttcggttttaagattatttgatttagttattgtaattattattattattattattattattatttggattatgcggtagtatagtattggtggtagagatattaatatggttttagtagaatattataatttttttttaatattttattgagttaagtatgaatgataaaaataattaaaatttattgaggtttatattaagtgaggtgtaaggtgtaagttttatatatgtatgttcgttttattttttaaaaaattttatgaaagaggaattattatttatattttatatatgatgaaacgattagaggtttagagaagtttatatatgattaaaagtatttagttagttgttagttgtgggtaatgttagaatttagatgggggtagtttggttttttaagttgtgtttagagttagttttattatattttaattaacggtgagtttttggttttcgaaatgtaattaaatttaatatttttatattatttttatagaagttatttggtttttataataattttttttttttgagatggagttttgttttgttgtttaggttggagtgtagtggtgcgttttcggtttattgtaattttcgttttttgggtttaagcgatttttttgttttagttttttgagtagttggtattataggcgggtgttattatgtttagttataataattgtttattattttattttataaataaggaaatggatttagagagaaggtaagtttttgaggttttgagtggttagatatttgaaatataagttttttgtttacgttttgtagttgttttttggatgtttggtatgttttttgataggtatagaatagattaatatatatatatatagttttagttgtggatttattgagatataattgatatattatgtaatttatatatttaaggtatgttgtttagaggtttttagtatatttatagttgtgtaattattttagttaattttagaatatttgagttattttattaaaaaatttcgtaatttttagttattattttttattttttatttttttagttttgggtaattagtaatttattttttgtttttatagatttgtttattatagatatttttcgtaaatggaataaaatatttagtggttttttgtgttttgtttatttatttagtataatgtttttaaggtttgtttatgttgtagtgtatattagaattttatttttttttaggtttgaataatattttattgtatggatgtattatattttgtttatttatttattagttgatggatattttagggatgttggaaattatgaataatgttgttatgaatatttaaatatttatttttaaaattatttttatgtaaaattgtttgttttttaatattatgataaatattttttttttagttttaaatttttaacgaaaaattttttttgatattagattagtaaattaatgaatagttgtatggatagatgtatttgaatgaatttaaaaagtaaataataaatattataattagtatagttgtttattagttatataaaatagtaataatattagggaattagtagtagtatagagttttaattgaatagtacgtggtaatttaatttattatttattatagagtttatttggaagtattagtttattttagttttttaaatgtaaatttaatgagttgaagttattttaataggatttggtagtagaaaaggaatgatgtaagtttttattaaattattataatttggtagtagaggatgtttgttttgatgatagtggttgtttttgttgtgatgtttttgttgtgatgatagttttttagtttaaattagtattgtgtaatatgaaattttaagaggttattttagtgtatttaaaattaaaaaattttagttataaagttttttaaaaattagtgatattttttgaaaagttggtttaagtatattttattaattttttttaataaaagagaatagtgtatttaaggtatttagtataaggtggaaagtttatttgatttattttttttaatgagtgaatgaatttaatttttattagattattttttgtaagttgcgtttattagtttatatattagttttttacgggtgattaattttattaaaaattttatgtttattaatattgtgttgaatttgaaattgtattattatatatgtttattaataggtaatggtgttagataatcgtgaaattgagaagtcgtttatttatttgggtgggaaaataattaatatttttagttgtaattttattaagaatcgttagggcgagacgaaagcgatatcgtttttatttttacgtgagttttggaaatggtttagtattatgacgttcgtcgaagacgtaggtgtagacgaggaataaaagagaagatttttcgtggaggtggtttgtggggttcgtttttttcgggcgtttgtcgtcgtttgtttttgatttcgtttttttcggcggtcgtagcgagtgcgtttcgcgatgtagcgggttgtggagggagtttttatggagtttttattaattattgaggattaggagacggtggtaggcggtagagaggtttgggtagggttagcgtttcgggttgcggagtataggacggcggcgtttaaggacgttttagggtaggttttagtttttttaatcggtgggagtttagttttaggggagttcgtagttttttttattttggttgatggaggcggggagttgcgtttgggtttttttatcgtcgtgttcgttttttgtggtttcgcggacgtagacgttagtagtcggggttgtttttttggtcgaatggtagagtttagttggggtttttcgaggataagtttttcggttttacggggtttggtttttagggggttttaagtttttatagtcgtttcgataaaatggaggacgtcgtttttttttgttgtagttatggcgggaggtgggggattattttttacggggcgcggcgagggtggaagggtttttattgtttttagcgcggtcgggattttagtttattcgcggtttcgaaagtttattcggattcgttttagcgttttttcggtttcgtttttcgtaggggtttttaagtaattggatagggagggcgttggggtatcgaggtcgcggtttttttcgggtagaggcgttgggagtcgttgtcgcggtttgggcgttcgggttcgggcgagggtaggcggtttcgtcggagtttttcgggttgtgtaggtttcggagagtttcgggtttcgaggagtcgaagcgggttcggtacggcgggtagcgaatttcgggtttttgattttggtagattcggtgggtgggggcgggggatcggcggggaggggattcggttaggagtcgagggtcggcggaggcgggagtggaacggtagggtcgggggagtggttcgtatttgacggatagtttttcggattattttatcgagggggggttttgaaggacggtcgtcggagttaatgggcgtgttcgaagcgtttcggttagtttttttcgttagttaatgagcgcgcggagggcggggttttttcgggttcggtcgcgtcgtcgtttttttcgtttttttttttttattagcgttaaagtcgggattggatcgagcggagttgtgcgtgtcgtcgaaggggggtgggtcgggggaggggaggttcgtttcgcggagttttagttagaatcgggtgaggtttattttcgttgtttttttagtttagagagtgggggggcggggattagcgtagtttcgggagnaggaggcgggggcggaggcgattagggagncggaaatgggtgagggtagttttcggagtttttcgtcgatacgggattaatntttcgcggcgcggtcgtcgttatcgttgtcgcgtcggggtttcgggggtagttcggggttgcgtttatgttataggcgtttttgcgtgcggttcgaggggttgggagagtgcgggcgaggtcgggagggttgggtgaggcggtcgttatcggcgggggtcgcggggtcggcggggcggcgggacggcgggacggcggggcgggggtgtcggtcgttcggggaggtcgcggggtattttttttttttttcggcggggggcgggggaggggcgtttcggttgggttttcgttttcggggtagcgtttttattttgtttatcggagtcgaggtttttaagtttttcggggtgagggttgttgtttttgtttcgtcgggttttttttttcgtttttttttttttcggcgttgcgttgcgcggtttttgtttcgtacgtattgtttggttgggtttttaatggcggacggggaggtagcgttgtcggtcgtcgattgtaggggggggtaaattttaggtttagggtaattgtttggggtaaatgtgggcgatatcggtttagtagtgacgtgagtcgttttttatttttgaattggtatttggagtgacggggatgacgttgggtgggtaaatttaggagggaatataaattttttgttggcgtcgaggtaacgtttttttttttttttttttttttcgggagtaggttcggtgtttttaggtttttttttttttagattttgttttttatatgggttttggttttaaatatgtattttgcgttgttttgttttatttacgtaggagggggttgttgtgcgtatggtgggggtaataatagaaggatcgaatttttttgattttttatttttttttttgtttttttttggtagaaagggttgggtttttttattaggttgtgtgtttttgatatattttttttttttttttttattttagg

SEQ ID NO: 244 - DNA, 6167 bp, Artificial Sequence
  chemically treated genomic DNA (Homo sapiens)
  unsure (957, 1009, 1039)
tttgggataggaggaaaaaagaaaaatgtattaaaaatatataatttggtgggagaatttaattttttttgttagaaggaggtagagaagggaataagaggttaaggaggttcggtttttttattattatttttattatgcgtataatagtttttttttgcgtaagtggggtaaaatagcgtaaaatatatatttggggttaaaatttatgtgaaaggtaaaatttggaagggagggggtttaaggatatcgagtttgttttcgggaagggaggggggaagggaaaacgttgtttcgacgttagtaagggatttgtatttttttttaaatttgtttatttagcgttattttcgttattttaagtattaatttagaggtaaggggcggtttacgttattgttgggtcgatatcgtttatatttgttttaagtagttgttttgggtttgaggtttgtttttttttgtagtcggcgatcggtagcgttgttttttcgttcgttattagagatttagttaaataatacgtgcggagtaagagtcgcgtagcgtagcgtcgaggaaaagaagagcgaaggaggggattcggcggagtagaggtagtagtttttatttcgaaaaatttggggatttcggtttcggtggatagggtgggagcgttgtttcgagagcggagatttagtcggggcgtttttttttcgtttttcgtcggagagaaaggaaaatgtttcgcgattttttcgggcggtcggtattttcgtttcgtcgtttcgtcgtttcgtcgtttcgtcggtttcgcgattttcgtcggtggcggtcgttttatttagttttttcggtttcgttcgtatttttttagtttttcgggtcgtacgtaaaggcgtttgtgatatgagcgtagtttcgagttgttttcgaggtttcgacgcggtagcggtgacggcggtcgcgtcgcggggnattaatttcgtgtcggcgggaggtttcggaggttgtttttatttattttcgnttttttagtcgttttcgttttcgttttttnttttcgaggttgcgttggttttcgtttttttattttttggattggaaagatagcggggataagttttattcggttttggttggggtttcgcggaacgaattttttttttttcggtttattttttttcggcgatacgtataatttcgttcggtttagtttcggttttagcgttggtgaggaggaggaggcggaggaggcggcggcgcggtcgagttcggggaggtttcgtttttcgcgcgtttattggttgacggggaaggttggtcggagcgtttcgggtacgtttattggtttcgacggtcgttttttagggttttttttcggtagggtggttcgaagggttgttcgttaggtgcgggttattttttcggttttgtcgttttattttcgttttcgtcggttttcgatttttggtcgggtttttttttcgtcggtttttcgtttttatttatcgggtttgttagggttaggagttcgagattcgttgttcgtcgtatcgaattcgtttcggtttttcggggttcggggtttttcgggatttatatagttcgggagatttcggcggggtcgtttgttttcgttcgagttcgggcgtttaggtcgcggtagcggtttttaacgtttttgttcgaggagagtcgcggtttcgatgttttaacgttttttttgtttagttgtttgaaggtttttgcgaggggcgaggtcggggaggcgttggagcgggttcgagtgggttttcgggatcgcgggtgaattggaatttcgatcgcgttgggggtagtggaggtttttttattttcgtcgcgtttcgtggggaatagttttttatttttcgttatggttgtagtaggaggagacgacgttttttattttgtcggaacgattgtgggaatttgggattttttaaaaattaaatttcgtggggtcgggaaatttgttttcgggaagttttaattggattttgttattcggttaagggaataatttcggttgttggcgtttgcgttcgcggggttataggggacgggtacgacggtggagagatttagacgtagtttttcgtttttattaattaagatggagggagttgcgggtttttttggagttgggtttttatcggttggaggggttgaggtttgttttggggcgtttttgggcgtcgtcgttttgtgtttcgtagttcggggcgttggttttgtttaggtttttttatcgtttgttatcgttttttggtttttaatggttgatggagattttatggaggttttttttatagttcgttgtatcgcggggcgtattcgttgcggtcgtcggggggagcggagttagggatagacgacgataggcgttcgaggagggcgggttttataggttatttttacgaggggtttttttttttgtttttcgtttatatttacgttttcggcggacgttatggtgttgaattatttttaagatttacgtaaagatggaagcgatgtcgttttcgtttcgttttggcggtttttagtgggattataattgaggatgttggttatttttttatttaaatggatgggcgattttttaattttacgattatttgatattattgtttattaataaatatatatgataatatagttttaagtttaatataatattgatgaatatgaagtttttagtgaggttaattattcgtgaaagattgatgtgtaaattaatagacgtaatttatagaggataatttagtagaagttgaatttatttatttattaaaaaaaataaattaagtaggttttttattttgtattaaatattttgaatatattgtttttttttattgaaaaaaattaataaaatgtatttgaattagttttttaaaaagtattattaatttttaggaaattttgtaattaaaattttttagttttaaatatattaaaatagttttttaagattttatattatatagtattggtttagattgaaaaattattattataatagaaatattataataaaaatagttattattattaaaataaatattttttattattaaattgtaataatttggtgaaaatttatattattttttttttgttgttaggttttattgaagtagttttagtttattgaatttatatttagaagattaaagtagattaatatttttaaataagttttgtgataaatgatagattgggttgttacgtattgtttagttggagttttatattgttattaattttttagtgttattgttgttttatataattaatgagtaattgtgttaattatagtatttattatttattttttaaatttatttaggtatatttgtttatgtaattgtttattggtttgttggtttgatattagggagaatttttcgttgagaatttagaattgggaagaaagtatttgttataatgttaaaaagtagataattttatataaaagtaattttaaaaataaatgtttgaatgtttataatagtattatttataatttttaatatttttgaaatgtttattaattgatgaatggataaataaaatgtggtatatttatataatggaatattatttagatttaaagaggagtgaagttttgatatatattataatatggataaattttaaagatattatgttaagtgaataaataagatataaaagattattgaatattttattttatttacgagaaatgtttataataggtaaatttgtagagatagaaagtagattattggttgtttagaattggagaagtggggagtagaaaatggtagttaaaagttacgaggttttttaatggagtgatttaagtgttttaaaattgattgaaatgattgtataattgtgaatgtgttaaaaatttttgaatagtatattttaaatgtgtgaattgtatgatatgttaattatattttaataaatttataattaaaattgtgtgtgtgtgtattaatttattttgtatttgttaaaaagtatattagatatttaagaggtagttgtaagacgtgagtaaaagatttgtattttaaatatttggttatttaaaattttagaaatttattttttttttgagtttatttttttatttgtaaagtaaagtaataaatagttgttgtggttgggtatggtggtattcgtttgtagtattagttatttaggaggttgaggtaggagaatcgtttgaatttaggaggcggaggttgtagtgagtcgagagcgtattattgtattttagtttgggtaatagagtaagattttattttaaaaaaaaagagttgttataaggattaagtaatttttgtgaaagtgatataaaagtgttaggtttaattgtatttcgaagattaagagtttatcgttaattgagatgtagtaaaattgattttgagtatagtttaaagagttagattgtttttatttgaattttggtattatttataattagtaattagttagatgtttttagttatgtgtaagtttttttaagtttttgatcgttttattatgtgtgaaatgtagataataattttttttttatagagttttttagggggtgaaacgagtatatatgtataaaatttgtattttgtattttatttaatatagattttagtaaattttagttgtttttattatttatatttgatttaatgaaatattagaaaaaaattataatattttattaggattatattgatatttttattattaatattatgttatcgtataatttaaataataataataataataataataataattgtagtaattaaattaagtagttttggggtcgggcgtagtggtttatgtttgtaattttagtattttgggaggttaaggtaggtggattatttgagatcgggagtttgagattattttggttaatatggtaaaattttatttttattaaaaaatataaaaattagtcgggtagcgtggtgtatgtttgtagttttagttatttaggaggttaaggtgggagagttgtttgaattcggtaggtagaggttgtattgagttaagattgtgttattgtattttagtttgggtaaagagtgagattttgttttaaaaagaaaaaaaaaataataatattttaataatggaaatattgaagaaaattttttatgaaagaaggaataaagattgaaataagtttaatattatttattgatatataaatatagtatttttgggtaggatgttttttataggatttaaaaataagaattttaaataaaaattgttagttttaagttgatatttataatttgtttatattgaatgatgtttggtattatagtaattaaaaatttataattttgttttattgttgtggagaaagggtgaagttttttggttttaggatttttggttttagaatttatgttattaattattttattatatagtttttttagatagttttttttttatttttaaattttaatttttaaatatgttattttaaaaaattttaaataggttaggcgcggtggtttatgtttgtaattttagtattttgggaggtcgaggcgggcggattataaggttaggagatcgagattacggtgaaatttcgtttttattaaaaatataaaaaattagttaggtatggtggtgggcgtttgtagttttagttatttgggaggttgaggtaggaggatgacgtgaattcggaaggcggagtttgtagtgagtcgagattgtgttatcgtattttagtttgggcgatagagtgagatttcgtttaaaaaaaaaaaaaaaaaaaaattaaatatagtattaaataatgtattttagattagtggtttataaatttttttttgattatgataattattgggatatgtattgtatattagtattcggtataaacgtttattaggtatatgattatataattgaaatataggatttatggaataattattttttattgttttagatgtattttaatattatttattttagtatatttaaatttagtttatatagttttagtttttttttttaaataaataaataatagttgtaatatattaagtttattttatggtttataaattgtggtttgaaaaatattattttggagaaagtaagttatggataaattt

SEQ ID NO: 245 - DNA, 6912 bp, Artificial Sequence
  chemically treated genomic DNA (Homo sapiens)
gaggtggagattgtagtgagttaagattgcgttattgtattttagtttgggtaataagagtaaaattttattttaaaaaaaaaaaaaagatataaatagaataatatgaattttgtttattgaataaatatttatttataatttatatggttttagttttgtattaggtgttaaatatatgggatttatgtagatatggtttttgtttttttggagatttgttttagttatagttttatataggggtgttagttttagaagtttaaatttaagagattgaagattaaagagaggattagagtgttagttttttttatatatatttgattttatttagggcgatggatagttagaataatttttttttttaggggagagatgtttttattatttgtatattattttgtattattaatttgattattatttaatattatagttttaatatgttattatgtgggtaagagatatattatagtaagcgaatttataagagggtgatttataagttatgttattatttatagtgagaattgtataagtttaagaagagattagaaaagttatttattaggttatttagacgtgaaggttattttttattaattttaattgaaatgtaaattaaaatagaaatgtttaatttttttaggaggtaataggtattttgagattttgggttttgttttttatttttgtattttttcggtttgaaatagcggttagtttttgttcgatgtaaggaatattagtatttaagggtttaggagtttcgttttttttttttagttttgggaaaagaaacgaattatagagatgtggttttttagagattcgggatgaggggcggggtgtaatcggaagtcgtagtattttcggttcggttattattttgtgtttcggttgtcggaagggttcgtttttgtgttattttttagcggtttggcgtcgaggcggcggtacgtaaggttggagtcgtagcgggagttttcggtgagcggggtgggttcgggggcgggtgggcgtgtagggaaggcggttcgggacgcgggtttgagtttgttgggattgtatagttttcggtagtttttttcgggttttgattttcggtatggttcgtcgttagtttcgtgttggggttcgacgtcgtggtttcggttgggtaggtagtcggttcgagggaagtattgaggatagtagtttcgagtttgtgtgtgtttgtggatcggtgtttttgtttaacggattttgttggcgttttgagaagagttgttttagtagtttgtttttttagtttaggtttttttgtttttttttagttttgtttgaggttaatttatagaaatattttgaggtttttttattatcggtggcgtttagatttttgaggacggatttttttgtttgtttgttttaaggggtggaacgattttagtttttttagttttttagttttgtaatataatggtatttaaaaattaaatttgaaaaatttaaatttgaaattatttatattaatattattttaggtaatatattttaatataaagtattaagatcgtaaatttagaataaatgttggtttttgcgcgcgcgcgcgtatatatatatatatatatatatatatatatatatatttattgttaatttgttagcgacgattgttattggttttttttttttgtagtttattagattaaagttttgtcgtggattggtgtttggaaattgttgttttagaatagtttgggttgtttgggttttataagttttttcgtagatggaattgttttggatttttggaattagaatttttgaatttagaatttgtttttatgttttagttagttaagtggttttgagtggattcgtttttttgatttttttgttttttttaatttttgttttgaaaattttttgtgagaagttaataaaatgtatgtttaagaatttgttatttttatgttatttgaaaattatttaaaattttttttaaaaatttttttttattatttttagattagttattaaggattattaagttttttttaattgttttatttttatttcgtttagaatttaagttatgtgtttagattattagaaaaatttaattgattttttttgatatttagtttttttatttttattattttttattaatagagttttgatattatttaagattttttttatgtttagagtgaaaaaggtttttttaattgtggtatagtatttagaagtcgtaaaagattgattgtatggtaaaaaatattttaagtaaagttatatggtatatatagttataaagatatttgataaattgagaaaaatttgtagttgttattgtaaataaaggattaatttttttgtgataaaagtgtgtataaattaataagatttaatattttaatggaaatatgggtaaaatatatgaatagttattttaaaaaatatataaatgattttatattaattcgtttaaaatgtaagttaaaaatttggcgaagagtataaattttgagaaatatattggtgaaagtgaggaaaggtatttttatatagttgtttttgatgggagtataaattataaattggtttaattttagtgaggttaaattggtaatattaaaattatatatgtatatattttttaatttagtaattttgatttaaggaattttttttatatatgtttatatatatttaaattgatgtatgtttaagattatttatgattatattgttggtaataagaaatgattgaaaattatttaaatattttattagtgttggtatgaataaattatgatatatttatgtatttataaaaatgcggagaggggttgtgtattgataggaaagatttttaagatatattattgagaagaggaaaatgtattacgttatttatggtgttttattatttgtgaaaaaaagggaattagaaaataatatatgtatatatatatgtagaaataattggaaagatagataagaagttaacggagaaggaaattttatatagtatatattttataattttaaattttgaattaagtgaatatattattatttttaaaaataaggaaaaatgtaaagtaaagtttttttaatgttgaaatgtaagtaaaattattttatttataggataggattatttttttagaatattgttttttaagagtagtagttagaatttaatttttgtttatttttttgttttatttttatatttttgtttttgaagtttattttttttttttggtttttttttatagagttatgtgtttttttttgtttttgaaaatagagtttttttttttttggaatggttttttttatagtttaatgatttttttatttttttttaaaagtttaatttaaaagtattttttatggttgggtatggtggtttatgtttgtaattttagtattttgggagtttaaggtaggtagattacgaggttaagagattgagattattttggttaatattgcgaaatttcgtttttattaaaaatataaaaattatttgggtatggtggtgcgagtttgtagtattagttgtttggaaagttgagataggaaaattgtttgaatttgttaagtagaggttgcgttgagtcgagattatgttattgtattttagtttgggtgatagagcgagattttattttaaaaaaaaaaaaaaaaagaaatttttttttatgaattttttttgtagttttatgtttttttattatttgtatttaaatattatattgaaattatgtttatatttttggtttttttgtttgttataagtaagttttttttaagggtttgtgtgtttaaataaagaggatgtttttatatgttattgatggtgatataattgttataattttaaaagtttaaaaatgtttttattttttagtttaataatttttttttaggagtttattttgaagaaataagtagagatgtaattaaaaatttgttattaaggatagtcgttgtgattttattaataataggggaaagttagaatttatttatgataattaaattatggtaaggatatagtttagaataatagtagtgattgttttttggttttgtgtgttttttggttttataattagaaaaatgttatttttaaagagtagatgatttttagagagtaagtttaagttttgtataataaaattttatttatatttatttatttgtgggattagatgtgaaaggaaaagaagaaaaggtaaatttatttaaatattttgattaatagaaagaataatttttagagaattaaaggtatgtagagtaaaattatatagaatttaatttattttttttttgttaattgaggaggtggttaggatttttttttatatgtattatgattaatgattatttgttaattttgcggaatataggaaagagtattagttatagaagggtaataagtaatatttaaattcgtatattaggtattgtttaaaaatttgaaatgtattatatattaaatttttatgataattttataaggaaggaattgttattatttttattttataggttaagaaattaaggtttagaagtgaggaatttgttttaggttatataggagtagttaggatgtttattgttagagtggtaaagagtttattgtaattagttgaagggattttatgaataaagattaaaggaagtttatgtgtttggttttagtagtttcgtgcgtaatatgagtgtttgtattttagagttttaggtagggggtttttgttagaggaagtattttttagagtttggaattttgtatttataaaggttttttttattattgggagttgattgggagttgattggggtttggaaagtttagttgtttttttgggttaattttaataatgattttttgaggttttgtagatgatattttttaagttgtaaggaagaagttaaggattaaggagatttggattggagaggagttttttttaaaaaataataatgataagagaaaatgtagtttataatgttttgagataagagggttttgtgaaggggaaggatgatatttggaaatggggaattagtttttaaggaagtagtttttttgtttgggagattttttatttatattttagataattacgttattatgagatatttggattttaggaagttttgagtcggtttagggaattttgtcgtcggtggttgagattagaagtacgtattaaggtatagattttggagttgttggtgttggagtagtttttgagtattttgtttggggagattcggatttgggtatagttttattattttggaagtggcgaggaggttgtggttttggtagaggagttgtagaaagattttgatggattagtaatataagtgagaaagatagggaggggcggtgggtgttgggatgaaaggaaggaaagaattgaggttaggttagagggtgattttgtgatttttattaaaaattaatagtattaatagtatattagtaattttaatgataattaaagtaggtttatgagtatttagattatagaatatgtttgtagagaaacggatttacgttgaggttttcgggtttaattgagaagtagtataaaaatattgattgttttgttttttgggtaatgtttgttaatgttgagtttggattaagaatttgaagaagaaatgttaataagtttttttttaaatagaagtttatgtattgtttttataattttgtttggaatggtgatgtaagtttagagtataaaaggtaatagtaggttaggtatagtggtttatgttatagtattttgggaggttgaggtgggaggattatttgaggttaggagtttaagattagtttggataatatgggaagattttatttttataaaaaatttaaaaattagttagatgtagtggcgagtgtttatagttttagttatttagaaggttgaggtgggaggattatttgaatttaggaggttgaggtagtagtgagttatgattatattattgtattttagtttgggtgatggagtgagattttgtttttaaataaataaataaataaaatggtagtagtataataagaatgaagttttttatattttggtaagatttttttttgtgtgttttattagggatttgtaagttaagggattgggttaagatatttgtttttgataagatttatatttttgattattagattgggattttaatgtagttttttatgtgtgtgagatttttttttgtatatttgtagtttattagaaatatttttgtataagacgtttgaattataatttaaatttgggtgtggtattaaggatgggtttgttttttttaataataacgtgaataattttagagttatatatttcgttataaattattaatatatttttatttgagagataaggaaattgaggtagatgtttagttggtcgtaaaattaagtgttttggtgttaattttagtgttagttgtatttgagtataaagggttaggtaaaggggttaataagtagatggtaaataagtagaagagatgtgattgaagttcgatttaaaatttaagtttgaagttaaaatttatgtttttaattattgtttattattttttattttttttttaatttatatttaggtttggtttttgtttttatcgttgtgtatagttttttttgggagaggttattagtgttatgagtggggttcgagggtagttttattgtttttaatgtaaagttttattgttgttttgatgttttatatttgaggtgggtttttttgattttatagttgtagattgtgggtagaaagaggtttatagtgtttaggtgagtttatttttttaagaaataagaagagttagtttattttatttgtttttagg

SEQ ID NO: 246 - DNA, 6912 bp, Artificial Sequence
  chemically treated genomic DNA (Homo sapiens)
tttggaaataagtaaaataagttagttttttttgttttttaagaaaatggatttatttaagtattgtggatttttttttgtttataatttataattgtgagattagagagatttattttaagtatggagtattaaaatagtagtaaagttttgtattgagaataatggagttgttttcgagttttatttatggtattggtgattttttttagaggagattgtatataacggtgggaatagaagttagatttgggtgtgggttaaggagggaatgggaagtaataagtagtaattaagagtatggattttagttttagatttaagttttagatcggattttagttatattttttttatttatttattatttatttattgatttttttatttagttttttgtgtttaaatataattaatattaaaattggtattaagatatttggttttgcggttagttagatatttgttttagtttttttattttttaaatgaggatgtattagtaatttgtaacgaaatatatagttttaaaattgtttacgttattattaaaagaaataagtttatttttaatgttatatttaagtttgagttatgatttagacgttttatatagaaatgtttttagtgagttatagatgtataaaaagaaattttatatatatgagaggttatattaagattttaatttaatggttaaggatataaattttattagaagtaaatattttaatttaattttttggtttgtagatttttagtagggtatataagaggagattttattaagatgtggaaagttttatttttgttatgttattgttattttatttatttatttatttaaagataggattttattttattatttaggttggagtgtaatggtgtaattatagtttattgttgttttaattttttgggtttaagtgatttttttattttagttttttaagtagttgggattataggtattcgttattatatttggttaatttttaaattttttgtagagatggggtttttttatgttgtttaggttggttttgaatttttggttttaaatgatttttttattttagttttttaaaatgttgtggtatgagttattgtgtttggtttgttattgttttttatattttaggtttatattattattttaaatagaattatagaaataatatataggtttttgtttagggaaaaatttattaatattttttttttaggtttttggtttaaatttagtattagtaagtattatttaagggataaaatagttaatgtttttatgttgttttttagttggattcgaagattttaacgtaaattcgtttttttatagatatattttatggtttgaatatttatggatttgttttaattattattaaggttgttagtgtgttattaatgttattaatttttaatgaaaattataggattattttttagtttagttttaattttttttttttttttattttaatatttatcgtttttttttgttttttttatttgtattgttggtttattaaggtttttttgtagtttttttattagggttatagttttttcgttatttttagggtgatggagttgtatttaggttcgaatttttttaggtaggatgtttagaaattgttttagtattagtagttttaggatttgtgttttggtgcgtgtttttggttttagttatcggcgatagagttttttgagtcggtttagggttttttggggtttagatgttttatggtaacgtaattgtttaaagtgtaggtgggaggttttttaaatagaggagttatttttttggaagttggttttttatttttaggtattattttttttttttataaggtttttttgttttagagtattgtgggttatatttttttttgttattgttgttttttgaaaaaggtttttttttagtttaggtttttttaatttttgattttttttttatagtttggagagtattatttataagattttaagaaattattgttaaagttagtttagagaaataattgagttttttaggttttagttagtttttagttagtttttagtaataaagagaatttttgtgagtgtaaggttttaggttttagagagtgttttttttgatagaaattttttgtttaaggttttgggatataaatatttatgttacgtacgagattgttgaaattaaatatatgaattttttttggtttttgtttataggatttttttagttaattataatagattttttattattttaataatgagtattttgattatttttgtgtaatttggaataagttttttatttttgagttttagttttttaatttgtaaaatagggatagtaatagttttttttttatggggttgttatgagaatttgatgtataatatattttaagtttttgaatagtgtttggtatacgggtttaaatgttatttattatttttttgtaattagtatttttttttatgtttcgtagagttaataagtaattattaattatgatatatatgagagaaaattttaattatttttttaattaataaagaaaggatgaattaagttttgtgtagttttgttttatatgtttttaattttttgaaaattgttttttttgttaattaaaatatttggataaatttgttttttttttttttttttttatatttagttttatagatggataaatatgaatagagttttattatatagaatttagatttgttttttagaaattatttgttttttagaaataatatttttttaattataaaattagaaaatatataaaattagaaaataattattgttattattttgaattatgtttttattatagtttaattattatagataaattttaatttttttttattattaataaggttataacggttatttttgataataaatttttagttatatttttgtttatttttttaggataaatttttaggagaaaattgttgggttgaaggataaaaatatttttaagtttttaaggttataatagttatattattattagtgatatatgaaaatattttttttatttgaatatatagatttttaaagagagtttgtttataataaataggggagttagaaatataaatataattttaatataatgtttaagtataagtaataggagaatataaaattatagaaaggatttatgaaaggaaatttttttttttttttttttttgagatggagtttcgttttgttatttaggttggagtgtagtggtatgatttcggtttagcgtaatttttgtttgataggtttaagtaatttttttgttttagttttttaggtagttggtattataggttcgtattattatgtttaggtaatttttgtatttttggtagagacggggtttcgtaatgttggttaggatggttttaattttttgatttcgtgatttgtttgttttggatttttaaagtgttgagattataggtatgagttattatatttagttatgaaaggtatttttggattgggtttttaaggaaaaataaaaggattattggattatgaggaaagttattttaggaagaaagaaattttatttttaaaagtaaggaaggatatataattttgtgaaggaagattagagaaggaaagtaaattttagaggtaagagtgtaggagtagagtagagaggtgaatagaagttaaattttaattattgtttttgagaggtagtattttgaggagatgattttgttttgtaagtgaagtgattttatttatattttagtattaaagaggttttattttatatttttttttatttttaaaaatagtaatatatttatttggtttaaaatttaaaattataaaatgtatattgtgtaaagttttttttttcgttagttttttatttatttttttagttatttttgtatatgtgtgtatatatattgttttttagtttttttttttttataaatggtaggatattatgaatgacgtggtatatttttttttttttaataatatgttttagagattttttttgttaatatatagttttttttcgtatttttatggatgtatagatgtattataatttatttatgttagtattgatggaatgtttgggtagtttttaattattttttattattaataatataattatgaataattttgggtatatattagtttggatgtgtgtaggtatatataagaaaaattttttgaattagaattgttgagttaaaaggtatatatatgtataattttgatattgttaatttgattttattaggattgaattaatttataatttatatttttattagaaatagttgtatgggagtgtttttttttatttttattaatatgttttttaaagtttgtgtttttcgttaaatttttgatttgtattttgaacgaattaatatagagttatttgtatattttttaaagtaattatttatatattttgtttatgtttttattgaggtgttgggttttgttaatttgtatatatttttattataggaaaattagttttttgtttataatggtagttgtaaattttttttagtttgttaagtgtttttgtgattatatatgttatgtgattttgtttaaagtgttttttgttatgtagttaattttttacgatttttgggtattgtattataattagaaagattttttttattttgagtatgaagagagttttaagtggtgttaggattttattagtgagaaatggtgggggtgggagggttggatattaagaaaggttagttaggtttttttaatagtttaaatatatgatttaagttttaaacgaagtagggataaggtaattgagaaaaatttggtagtttttggtaattgatttgggggtgatggaaaggaatttttaaaaagaattttgaataatttttaaataatataaaaataataaatttttaaatatatattttattagttttttataaaaggtttttaaagtagaagttaaaaaaaataaaaggattagaggagcgaatttatttaaggttatttagttaattgagatatgggagtaaattttgaatttagggattttaattttagaagtttaaaataattttatttacgaagaaatttatgaaatttaaataatttaaattgttttaaaataatagtttttaaatattagtttacgataaagttttaatttggtaagttgtaaaaagagaaaattagtaataatcgtcgttgataggttggtaatgagtgtgtgtgtgtgtgtgtgtgtgtgtgtgtgtgtgtgcgcgcgcgcgcgtaaaggttagtatttattttgagtttacggttttagtattttgtgttaaaatgtattgtttgaagtaatgttggtatgggtggttttaagtttgagttttttaagtttgatttttaaatattattatattataaaattaaaagattaaaaaagttaaaatcgttttattttttaaaataaataaataaaaaaattcgtttttaagagtttgggcgttatcggtaatagggaaattttagaatgtttttgtggattagttttagataagattgaggaagagtagaaaggtttgagttgggggagtaggttattgaggtagttttttttaaagcgttagtagagttcgttagataggagtatcggtttataaatatatatagattcggagttgttgtttttagtatttttttcgggtcggttgtttgtttagtcgaggttacgacgtcgaattttaatacgaagttggcgacggattatgtcgggggttagggttcgggagaggttatcgagggttgtgtagttttagtaagtttaggttcgcgtttcgggtcgttttttttgtacgtttattcgttttcgagtttatttcgtttatcgggggttttcgttgcggttttagttttgcgtatcgtcgtttcggcgttaggtcgttaggagatgatataggaacgagttttttcggtagtcgaggtatagaataatggtcgagtcgagaatattgcgattttcggttgtatttcgttttttatttcggatttttaggaagttatatttttatggttcgtttttttttttagaattggggaagagaggcggaatttttgagtttttgggtattagtgttttttatatcgaataagaattggtcgttgttttagatcggaagggtgtagagatgaaagataggatttagggttttaggatgtttgttgttttttaagagagttggatatttttattttgatttgtattttaattgaggttgatagggagtgatttttacgtttgaatgatttggtaggtgatttttttggtttttttttgaatttatgtaatttttattataaataataatatgatttataaattatttttttgtgaattcgtttattgtggtgtattttttgtttatatgatgatatattggagttatgatattaaataataattaagttgatggtgtaaggtaatgtgtaaatggtagggatattttttttttgaaagaagaggttattttagttgtttatcgttttgggtaaagttaggtgtatataaaggaaattggtattttgattttttttttggtttttagttttttaagtttggatttttggaattgatatttttatatgggattatggttgaaataagtttttaaaagggtaaaggttatgtttgtatggattttatgtatttagtatttagtataaagttgaagttatataggttgtagatgaatgtttatttaatgagtaaggtttatgttattttgtttatgttttttttttttttttgagatggagttttgtttttgttgtttaggttggagtgtagtggcgtaattttggtttattgtaatttttatttt

SEQ ID NO: 247 - DNA, 6074 bp, Artificial Sequence
  chemically treated genomic DNA (Homo sapiens)
tattgaagaaaggtattagaatagtaaaggtaataaattgtaaggtatatttatggtatagtatattttattaattatagaataaaaatataatatttgttttttgtttttaatattaaattttgatatttgtataatatattttagtttataaagtttttatattttagataattattgagttaggagattggttatttgtagagggttttattttttataagggtttttgggtacgttattttacgaaatttttagggaagttttagttttttggggatttggggtcggggtatatgtttttggatatttagtttggtgttgtgtatagtattgttgtattttttatttattttttattttttattttataaagatttttttttttattttttttattgttgatttgtttttttttatttttttaggttgttaaagtaaatgtaaaataagtattagaaattttagtttgtgatttttgaagggtatttttaaatggtaagtttggtgtggtattgttatatgtttttttttttttggagagtaaagttttttgagagagtaggaatttttttgttaatgtatacgttgtaggatttatattgtggaattttttgtatttagtgttgcgtgaaaataatgaggattttaagtttattttattggacgtcggtttttaaatttttaagatattagaagtttttttattaagttaaaagattttatgtattaattttgttttttaggggtaggagttggggtggggtttggaaagttttgtttggataaataattagtattgtagttttatttatttgatgtttgattttgcgtttattaaaattgatttaaatttttaatggaaaatgatttttttttttttaaatgttaagtgttgtgtgatttgtatttggattattttcggtgtaatttgaagattttttgtgatgagttgtggttttattattttgggaattattaagagaattttgttttatttataatttaaataataaatgtttttttttttatgtatgtttttatttagtatatagtttgttagatttatggatgaatatgggttaatataatatggtatttatttttttggaaatagatttttaaaattttattaagtattttttgtatttattaaatgtgaagtgagtgtttggtgtgtgttaggtatcgagttgggtatagtatatttttgtttttagagttttatagtttagtgagtttaatagaagatgaatagttttgatgatataaaaaatagatatatgtgtatgttgtgatagggggagatataagtttttgtggaagtattatttgggaggattagggaaggtattttggaaaaattgagttttgaaagatggatagagttaattatatgaagagtggagaagggtattttagataaggtgaatagtattaggaaagtttagggagggtatagaaaagaaagaatagtaatttttgtagtggtttttaatgggagtggtagttatggaaggaaggagaggtagtagggattagtttttgaaggtttttgtgtattatattttaagaagtttaaattttaatttaaggttattgggaagttattggtagattttgtatgttaggaagtttattatttatttatttggagtattgtaggtggagttaatgtggatgggttttttgtttattattaaattttgtttttgttaggaataggatagtttatgttgtttttttttgtgtgtttgtttttttttgtgtgtttgtttttttttttttttttgttttttttttttaaaagttaaaggaaagcgtataggttttagaaggaaaaagaaataattattagaaaaataagtataagttgattttattatggcgtagtgagattttaaattaaaataaggtttttagggattgagtttttaatattggtattttaatagggagataggatttgggaagttgacgttgtgtgaaagttatagaattaagtagtttgtaaatttggatttttgaaaatcgttttattgatttaggaaatagtgtaaggaagtgggttttttagaattttgggtaggttaaatattatttgaaggtatcgatttaaataatatataaaagtattatttaggaatattttgagaaattaatataaaaattgatttggttaggtatggtggtttagtttttggtaatagtgttttgggaggttaaggttggaaaattatttgaggttaggagatttaggttgtagtgagttatgattgtattattgtattttagtttgggtaatagagggagagttttaaaaaagtaaattgtttaagattattgaaattattagtatttaggaagaaataaatgaaattatatttaaggggtttatatttaaatttagggtttttaggatttttaaagtaaaaagatggatataaaataaaaaaattataagttatttgagaaaaaaataaattattatgaggtagagatagtagaggaaaaattatatatgaagatttaggaattagggagttatttaagatagattgtgaaagtatgttgtaagtgattgagggtaatgaaaaaaatgttataagagtatgaattagaagcgttttgagaaagaatgaagataatgtgattattgattgtaaatttatttgatgggtaataatagatgagatatagttattaagagtggatcgataattttgaatgtggatgtgaggtaattgtagtatagtataaaaaggttgagaaatgatggagtttttaagttgtttgtggatattggtttggagggggataggattaagaaaattagttatggaggttgaattaagttatttttttaatgtattcgtgtttgttacgtgttagtgtcgtttaggagtagaggatattgtaattttttttaaagtttttatgaatattttttagtgggttataatggtttaatcgggaaatggtagtagagatgaagagatggatggattcgaaagatattttttggaagttggaattaataggatatggtgaataattaagagatagtaaaagtataatggaggaaataatggttttttttgttattataggaagaagttttggagtagagttttatttattttaaatgtatttattgtgtattttattataggtattggagattgatggaaaatagtttttgattttaaagagttttataggaaagatgagcgatggttatgtaatatgattaatattgggatagagaggtgtttaggttattacgggaggatttaggtgatttttaattatgtttgagagtaggggaaatgggattaaagaaaatattttagaagatatgaagtttgagtttatgttttgaaaaatttaaagtttaatttaattaaggataaagaattagaagaaatagtatatttaaaagttaaagaatacgggatttttgtgtgttttgtatgtatatacgtgtgtgcgtgtgtgtttgaaaggattggagaggagggcgaagagaataataagatgaacgttaatttaatgtagaatgtttgaagtttgtattttatttaataagatagcggggagtgatggaaggattttagataggaaagggatatgagtacgtttgttaagagagttcgttttgattatagtgggtacgtgaaggtgataaatttggaggtagatagtttatatttggaggtagttgtagttatttagatgagaagtgagagggatttaagttgtaaattgtgggaataaagataagattcgttaaaaagaaagagaatatattatgtagcgtggaaaggagaagggtggagagtagtttgtgtagaaggaataatttttaaaaagatatggaagattgaaaagatattttgttgtagggagattagtaatgtattttttataattaggtgatatagggaaaaggtaggatttgaagtttgaaaaatagattgggggttgattgtaaagagtttcgtgttatttttaggattttggaattgattttattaatatgaaaaaggttttgttttaaaatattgagtaatatagttggaattataatttagaaagataatagttggtgttattatttttttaagtaaagatagtaatatatttaatgtttataggttttagtaatatatttaatttttatagtaagtttattagataaaaattattattattttttttttatagatagagaaattggtattaggagaatgagaatttgtttatggttttattttggaaatatttagtaagcgatagagttaggatttaaatttaggtagtttgattttagaattttcgtttataattttatatattttttttatggttggtgttttttaattatggatatatattcgaattgtaagtagtatttttaaatatatagttatttgaattgattgaattagagtgtttgaaaaatgatgtgtgatattatgttttgtaaaatttttataggtaattttgttgtattttgtttatagttgagtattgtagggattttaggaagttagagtagtagtttaggtaggagatgatgaaggtttaaattaaagtagtttgtaggaaggaagagaagggaatcggtttggagatttaagcgggggaattggtagtatttgtgaagtggaaatgtagtatttttttgtagagtatgaattttgtttaggaaagggagtagaggattatatttttagttgtaaattatttttttttaattggatttgttgatttatggttatggtggttggggaaaagaggatttaattatttgaagaagtttgtgtagaggattatgattgaatttaggttgttgtttttgtgtatagttttatgtttatatttttgtttgtttttatttttttatttagggtttttggaagaaaattttcgttgtgtttaggttgaggcggggggttaatgatagtgtgagttttagatggtgtgagattattttaaagttaagaaatggttatagtcgtggaattagaggattaggatttttgggaagaagagggaattttgatggtgaaattggaagatgattttatttgtcggttagagtttgttttatagagggatgattcggtgttggaaattttttattagaattttcgacgttttcgttattaggaggtagtaagttttagagaagtttttattagatttcgagaattttgttattagtggttgagattagagaggcggataaaggagtagattttagagttgtttgtgttggaataattttttatcgttttatttggagaattatagagttgggtgcggggttaacggttagaaagtggcgaggaggtagtgacgttggtggagggtttgtagaaataatttaggagattaaggcggtgggtgaggagggggagttttgatttgtgtgatgtggagggggattatttgttggaaggttggatttgcggggagagtttgtaggatttttataaattattagtgggttttgtttttgggttgtttatatattatgagttttatggattagggggatgtgtgtgtatgaatgtgattttttggatattggaatatttgtatagggattatttgaggggttttagttattaaagggttatggttttggtttttttttttttgaatgttgagtcgtgggtttttggagaggagaattttgtgattttttcgaaggtttttatagatttttagttatagatttttttttttggttggttagttagggaagtaggtagtaaggagagttgtaggtgggataggtggagatgggaaggaattttgggtgataggggtttaggttgggggtggtgagagagtagtgtaggtttgcgtattttttgttttgttttggggaggataatttttagtttttttttgtttgttttattgaaattggagttttttttttttgtttgggtttttttgggagtgttttttttaggtatttttttttaaaataagttttcgtgataattaagaatttttttttgattttatggtgattggaagttggaattatttttagg

SEQ ID NO: 248 - DNA, 6074 bp, Artificial Sequence
  chemically treated genomic DNA (Homo sapiens)
tttgggaataattttaatttttagttattatggagttaggaggaagtttttggttgttacgggagtttattttaggagaagatgtttagagaaaatatttttagagggatttagataaggaggggaaattttagttttaatggagtaggtaaggaggagttgaaggttattttttttaggataaggtaggggatgcgtaggtttgtattgtttttttattatttttagtttgggtttttgttatttaaggtttttttttatttttatttgttttatttgtagttttttttgttgtttgtttttttagttgattagttaggaagggggatttgtgattggggatttatgagaattttcgaggaagttataaaatttttttttttaggaatttacggtttaatatttaaagaagggaaaattaaagttatgattttttggtggttgagattttttagatggtttttatataggtgttttaatatttagaaagttatatttatatatatatatttttttaatttatggggtttatggtatatgagtaatttaagggtagagtttattaataatttatggggattttgtaagtttttttcgtaaatttagttttttagtaaatagtttttttttatattatatagattaggattttttttttttatttatcgttttggttttttgggttgtttttgtaaattttttattagcgttattgttttttcgttattttttggtcgttggtttcgtatttagttttgtagttttttaggtaggacggtaagaaattgttttagtataagtagttttaggatttgtttttttgttcgtttttttggttttagttattggtgataaagttttcggagtttgatgagagtttttttagggtttgttgttttttggtagcggaagcgtcggaagttttggtgggaggtttttagtatcgggttatttttttgtaagatagattttggtcgataggtgaaattattttttagttttattattagaatttttttttttttttaaagattttggttttttggttttacggttgtagttattttttggttttggggtggttttatattatttagagtttatattgttattagtttttcgttttagtttggatatagcgaggatttttttttaagggttttggatagagaagtaaagataaataagagtataagtatgaaattatatataaggataatagtttgagtttaattataattttttatataaatttttttaaatggttaaatttttttttttttaattattatagttataaattaatagatttagttgggagaggataatttataattaaaggtatggttttttatttttttttttaggtaaggtttatattttgtaagaaaatattgtatttttattttataaatattgttaattttttcgtttaagtttttaaatcggtttttttttttttttttttatagattgttttagtttgagtttttattattttttgtttggattattgttttaattttttaagatttttgtagtatttaattataagtaaagtataatagaattatttgtggagattttgtaaaatatagtattatatattattttttagatattttgatttagttaatttaggtaattgtatgtttagagatgttatttgtagttcgaatgtgtatttatggttgagaaatattaattatgagggagatgtgtaaggttatgagcgaaagttttggagttaagttgtttgggtttgaattttggttttgtcgtttattaggtatttttagagtgggattataggtaagtttttatttttttaatgttagtttttttgtttatagaagggagataataatggtttttatttaataggtttattgtaaggattaaatgtattattaaagtttatgagtattaaatgtattattatttttgtttagaagagtgatggtattagttattatttttttaaattatagttttaattatattatttagtattttaaaataaaattttttttatgttagtaaaattagttttaaaattttgggaatgatacgaagttttttataattagtttttaatttattttttaagttttagattttattttttttttgtattatttggttataaaaaatgtattgttgatttttttataatagggtgtttttttagttttttatgtttttttgaaggttgttttttttgtataggttattttttattttttttttttttacgttatatggtgtgttttttttttttttaacgggttttgtttttatttttataatttatagtttaggttttttttattttttatttggatgattgtaattgtttttaaatgtgagttatttgtttttagatttgttatttttacgtatttattatgattagaacgagtttttttggtaaacgtgtttatgttttttttttatttaagatttttttattatttttcgttgttttgttaagtgaaatataaattttaaatattttatattaggttgacgtttattttgttatttttttcgtttttttttttaatttttttagatatatacgtatatacgtgtgtatatgtaaagtatataagagtttcgtgttttttagtttttgaatatgttgttttttttgattttttatttttggttaggttaaattttaaattttttaagatataagtttaagttttatgttttttgagatgttttttttgattttattttttttatttttagatatagttagaaattatttaagttttttcgtagtgatttgggtatttttttattttagtattggttatattatatagttatcgtttattttttttgtgaaattttttgaggttagagattattttttattaatttttaatatttataataaagtgtataataaatgtatttaaaatgaataaaattttattttaaagtttttttttatggtaataggaagaattattgttttttttattatgtttttattattttttgattatttattatattttgttaattttaatttttaaaaaatgtttttcgaatttatttatttttttatttttattgttatttttcggttgagttattatgatttattagaaggtatttataggaattttaaaaaaaattataatattttttgtttttaaacggtattggtacgtaataggtacggatatattggagagatgatttagtttaatttttatgattggtttttttggttttgtttttttttagattagtgtttataagtagtttaagggttttattattttttaatttttttgtgttatattatagttgttttatatttatatttaaggttatcgatttatttttaatagttgtgttttatttattgttgtttattaaatgagtttatagttaatgattatattatttttatttttttttaaaacgtttttaatttatgtttttatgatattttttttattatttttagttatttgtaatatatttttatagtttattttggatagttttttaatttttagatttttatgtgtaattttttttttgttatttttattttatggtgatttattttttttttaagtggtttgtaatttttttattttatgtttatttttttattttgggagttttgagagttttggatttaaatgtgagttttttgaatgtaattttatttgtttttttttaagtgttaatggttttaatgattttggatagtttgtttttttaagattttttttttgttgtttaggttggagtgtagtagtataattatagtttattatagtttggattttttggttttaagtgattttttaattttggttttttaaagtattgttattagaggttgagttattatgtttggttaaattagtttttatgttaattttttagggtgtttttgaataatgtttttgtgtattatttagatcgatgtttttaagtaatgtttggtttatttaaggttttggagaatttatttttttgtattattttttgggttagtaggacgatttttaaaggtttaggtttgtaggttgtttaattttgtaatttttatatagcgttagttttttaagttttatttttttgttggagtattagtattaaaagtttaatttttagaaattttattttggtttggaattttattgcgttatggtaaagttagtttatatttatttttttagtggttatttttttttttttttggaatttatgcgtttttttttagtttttgagagagagagatagagagagagagagagatagatatatagggagagatagatatatagggagagatagtatgggttgttttgtttttgataggaataggatttaataatgggtaggaggtttatttatattagttttatttgtaatattttaagtaggtgagtggtgaattttttaatatataaaatttgttaatggttttttagtgattttaggttaaaatttaaattttttaaaatgtgatatataaagatttttaaaagttggtttttgttatttttttttttttttatgattgttatttttattgaaagttattgtaagaattattgtttttttttttttatattttttttgggtttttttgatgttgtttattttgtttgaagtatttttttttattttttatgtggttaattttatttattttttagagtttagtttttttaagatgttttttttggtttttttagatgatgtttttataggaatttgtatttttttttattatagtatgtatatgtgtttattttttgtgttattaaaattgtttattttttgttgaatttattggattgtaaagttttgagggtagggatatgttgtgtttagttcgatgtttggtatatattaggtatttattttatatttgatgaatgtagagaatgtttagtaaggttttaaaagtttgtttttagaaggatagatattatgttatattaatttatatttatttataagtttagtaaattgtgtgttggataaaggtatatatagggaaaaaaatatttattgtttggattgtgagtaaaatagaatttttttagtggtttttaagatgatggaattataatttattataaggaatttttaggttgtatcgggaataatttaaatgtaagttatataatatttggtatttgaaaaaaaaaaaattattttttattgaggatttaaattaattttaataagcgtaaaattagatattaaataaatggaattataatattaattatttatttagataaagttttttaaattttattttaatttttatttttggaagatagaattaatatatagggttttttggtttaataaaaggatttttagtattttaaaagtttgagaatcgacgtttagtgaagtagatttggaatttttattgtttttacgtagtattaggtataagagattttatagtatggattttataacgtatgtattgatagaagagtttttgtttttttaaagggttttgttttttaaagaaaaaagaatatgtaatagtgttatattaaatttgttatttaaaaatgttttttagaaattataagttgagatttttggtgtttgttttgtatttattttggtagtttaggaagatgaaggaaaatagattagtaatagaaggaatgaaggaaggagtttttgtggggtaagagatgggaaatgaataggaggtatagtagtgttgtgtatagtattaaattgggtatttaaagatatatgtttcggttttagatttttaagaaattggagtttttttgagggtttcgtgaagtaacgtatttaagagtttttgtaaaggataaagttttttgtagataattagttttttaatttagtgattatttgagatatgagagttttatgaattaaaatgtgttgtgtaaatgttaagatttaatattagaggtagaaaatagatgttgtgtttttattttataattaatgggatgtgttatgttataagtatattttgtaatttgttgtttttgttattttaatatttttttttaatg

SEQ ID NO: 249 - DNA, 5745 bp, Artificial Sequence
  chemically treated genomic DNA (Homo sapiens)
  unsure (1329)
agttggtatttattatttattatgttcgaagttttgttaagcggttttgtgtattatagttaattttttttttttttttatttttttttttttttttgagacggagtttagtttttgttgtttaggttggagtgtaatgaatggtattatttcggtttattataattttcgttttttgggtttaagtaatttttttgttttagtttttcgagtaattgggattataggcgtgtattattatgttcggttaatttttgtatttttagtagagacgcggtttttttattttggttaggttggttttaaatttttgattttaggtgattcgttcgtttcggttttttaaagtgttgggattataggcgtgagttattgtgtttggttttaattatagttaatttttttttttttttttttttttttttgagatggagttttatttttgttgtttaggttggagtgtaatggcgtgatttcggtttatcgtaatttttgttttttaggtttaagcgatttttttgttttagtttttttagtagttgggattataggtatgtgttattacgttcggttaattttgtatttttagtagagatggggtttttttatgttggttaggttggtttcgaattttttattttaggtgattcgttagttttgattttttaaagtgttgggattataggtatgagttatcgcgttcggtttatagttagttattgagaggtaagtacgtttttatatagatgatttgtgagttgaatgtagatagtaggtgtgttttgttgatttgtatggaatttttttttttttttttttttttttttttgaggcggagtttggtttcgttttttaggttggagtgtagtgacggtatttcggtttattgtaagttttttttttcgggtttacgttatttttttgttttatttttcggagtagttgggaatataggcgttcgttattacgttcggttaattttttttgtatttttagtagagacggggttttatagtattagttaggatggtttttattttttgatttcgtgattcgttcgttttcgttttttaaagtgttgggattataggcgtgagttatcgcgttcggttggaatttttaaattttaaaattttgttattaatttaaaagttaggaggttatagaggaatcgaattgttttttggtttttttttaaggattttttaaaggtttttgaagttttttttttttttcgttttatttttaagttattggtttcgtatgtaagttggtggttggaggtatttaagttttttgtttttaaatagagttgggggacgggcgtantggtttaagtttgtaattttagtattttgggaggtcgaggcgggtggattacgaggttaagagatcgagattaggagtttgagattagtttggttaatatagtgaaattgtatttttattaaatatataaaaattagttgggcgttgtggcgggcgtttgtatttttagttatttaggaggttgagttaggagaatggcgtgaattcgggaggcggagtttgtagtgagttgagattgtgttattgtattttagtttgggcgatagagtaagatttcgtttgaaaataaataaataaataaatagagttggggttttattatgttgttgaggttggtttggaatttttgggtttaagttattagtttattttggttttttaaagtgttgggattataggtacgaggtattgtatttagtttcgtttaagtttttaatgtttgttttatttattgatttattttgttttgacgtttttcggtgtttttttaggggttgttgttgttatatggcgattgtggttatcgttttttttggatttgtttagatttaaaagttagttttggaaggaatattttttatttttaagaagaagttaatgtttgttttatagtagatgtttaataaattttttttgaataattaaatagatgtttagattttatttgatttaatttaggtgattttatggagggatttaaatttttggatttttttagtatttttgaagtggttttttttgttggtagagaaatttttgtttaagagtcgggatatatcgatatatttatttttgggggggtttggtgtatttttgggatagtgtggggtgaaagggttttttttaggagtgaattttttgattttggatatttagttttttttttggttggtagagtgaagagtgttatgatttttaggattttttttcgttttagtttttagtttatcgtttattttggtttgaaaatagtattgatttgttaagttgtatgttttttttcgttttgaggtttaaaatatttagaagtcgggtgtggtggttcgtatttgtggttttagttattgagtaggttgaggcgggagatttgtttgaagttaggagttcgagattagtttgggtgatatagcgagattatatttttaaaaaattaaaaataaaaatagaatatttggttaggtatagtggtttagtttataattttagtattttgggaggtagaggtgggtggattgtttgaatttaggagttcgagattagtttggttaatatgatgaaattttgtttttattaaatatataaaaattagttggtcgcggtggtatatttttgtaattttagttatttgggaggttgagatagaagaatcgtttgaatttaggaggtgggggttggaatgagtcgaaatggtgttattgtattttagtttggatgatagagcgagattttgttttagaaaaataaaaataaaataaaataataataaaattttaaaattagaatatttggaaaatattagatataaattttaggagtaattttttttttattaaattgataatagtattaattagaattttaggatttttaaaatatgtttaattttaaaagtagagttgtaaatttaaatgttataggggttaagtaggtattgtggttatttagaaagtggattttgaaggtggggaaggtgggtttagtatcggtaaatgttttaattttttttaaagaattaattttataggttgggcgcggtggtttacgtttgtaattttagtattttaggaggttgaggtgggcggattatttgaggttaggagttttagattagtttgatcgatatggagaaattttatttttattaaaaatataaaattagttaggtgtggtggtatatgtttgtaattttaggtaattaggaggttgaggtaggagaatcgtttgaatttaggaggcggaggttggggtgagttgagattgcgttattgtattttagtatgggaagaagagcgaaatttcgtttaaaaaaataaaagaattagttttatgagtgttaattttttaatgttagaaattaagttaaaaaaaaaataaaattagttgggcgcggtggtttacgtttgtaattttagtattttgggaggttaaggtaggtggattatttaaggttaggagttcgagattagattagttaatacggtgaaatttcgtttttattgaaaatataaaaattagttcggtatggtgatgggtatttgtaattttaaatatttgggaagttgaggtaggagaattatttgaattagggaggtggaggttgtagtgagttaagattacgttattgtattttagtttgggttatagagtgagattttattttaaaaaaaaaaaaaaaaaaattaaattttttgggtatgatggtttatatatgtaattttagtattttgggaggtgggaggattgtttgagattaggagtttaagattattttgggtaataaagtaagatttttatttttataaaaaaatttaaaaaattagttaggtatggtggtatgcgtttgtggttttagttatttgggaggttgaggtgaattgtttgagtttaggaggttgagggtatagtgagttatgatcgtgttattgtattttagtttgggtaatagagtaagattttgttttaaataagtaaataaataaataaataaatttttaaaagtttatataatatagtacgagttggtatagaggtagttgcgtttattttattgtgtgaagttgtgtattttaggggattttggtgagttaaagatagtggtatggggacgttttttagggaaattttttggaatttgattttaggattgggtttttggttttttttttgatatttagtttttatgtttgtttaagagaaatggtttttttttttagaaagtaaagtatagtttttgttttttttatttgaggttttattttttagggtttaaagggaaatggtgtttgagaggtagaatttgtagttgttaggcgtgtttgagaatttagaattttatttatagttggattatattttttatttttaagttgaaatgggtttggaagaatcggattaattaatttttttttaaggtgtggggtattcggattggggggagtttttagtttgttttttaagtttatttttagggagagagttttgtgttagttttggggggatttagagggtttttgattaggagtttttaaatgaatttagggttttttaggagataataatttttagaaatttcgagtgttaaaataaatggttttgttttttttattttgtaaaatgtttttttttttatttgtgaggataattgtagtgttcgttttgaaattttaaataatataatttttttataaaatgtattttttatttttttgttttggtggttttgttttgttggtattatgaacgcgttttgggtaaagttatttttatgagttggtattgcggttttgggagttatttttcggttaagagtaggtgtaatttaggttcgagattttatattcggaatttttaaaatcgggaacgttgtagggttgcggttgtatggggaatgggatttgggagggattttttgttttttttatttttagtttttatttaattttttcgttcgtttcgtgtaggttgtggagatttttttttcgggggagggggtttttattgtcgtaggtgttttttttgtttttatttcggtgagaagggggtgttggggagggtatttggatttcgagatcggcgtagatgattagtttgtaggaggggatggggttaaaggtggaaggttttaagttggtaggagagaagggggttaggatcgggtttgggaaggagaaggatattgtttgttaggatcgagagtaggatgggtattttaggtttggggtaggtggttgtagttgtaggggggttgttgagagcgggtaggttgatttttgaatttttggtgggtatgggagttaggtagggatatacggtgtatgttttggggtcgggggatagtaggttttggattattttggttttgacgggcggggttttattagtatttgttttgtaggatttttgtagaattttttgtttttgatgataggaaatagcgattttaatttagtttcggttttttttgagtcggttatattgagatgcgaggtttttgttttagtaataaaggggataatataaaatagtatttttttaaaaataggatttagaaaatattatagagagtgggattatcggataggatttgggagatttttttttcgattgggattagggagcgttggtattcgtggggatttttagggttttttgggggtgtttaggaagcgagggttggtttttgtttgtttttttagg

SEQ ID NO: 250 - DNA, 5745 bp, Artificial Sequence
  chemically treated genomic DNA (Homo sapiens)
  unsure (4417)
tttagaagagtagatagaaattagttttcgttttttggatatttttaaagagttttgaaaatttttacgagtattagcgttttttggttttaatcggaaagaaagttttttagattttattcgatggttttattttttgtgatgttttttgggttttatttttgaaagaatgttattttgtattgttttttttattgttgaagtaagagtttcgtattttagtgtaatcggtttagggaaagtcgaggttaaattggaatcgttattttttgttattaggagtagaaagttttgtagagattttgtagaataggtgttggtggggtttcgttcgttaaggttagggtaatttaggatttgttgtttttcgattttaggatatatatcgtgtgtttttatttgatttttatgtttattaggaatttagaaattaatttgttcgtttttagtagtttttttgtagttgtaattatttgttttaggtttgggatgtttattttgttttcggttttggtagataatgttttttttttttttaaattcggttttggttttttttttttttgttagtttgaagttttttatttttgattttatttttttttgtaagttgattatttgcgtcggtttcgggatttagatgttttttttagtattttttttttatcggggtggaggtagagggggtatttgcggtagtgggggttttttttttcgggaagggagtttttatagtttgtacggggcgggcgggggagttgggtggagattgggagtagggaagataggaagttttttttagattttattttttatgtagtcgtagttttatagcgttttcggttttgagggtttcgggtgtggagtttcgagtttgggttgtatttgtttttggtcgggaggtgatttttagagtcgtaatgttagtttatgaggatggttttatttaggacgcgtttatgatgttagtaaggtagagttattaaaatagaaaaatggaagatgtattttgtggaaagattgtgttatttgaaattttaaagcgagtattgtagttgtttttataggtagaaagaagggtattttgtagggtggagagggtaggattatttattttagtattcggggtttttgaaggttattgttttttgagggattttgaatttatttagggatttttagttaagggttttttgggtttttttaagattggtatagaattttttttttaagagtgaatttgggaaataggttgggaattttttttaattcggatgttttatattttgggaagaagttggttaattcgatttttttaggtttattttagtttggggatagagggtgtgatttagttataaatggggttttaagtttttaaatacgtttggtagttgtagattttgttttttaggtattatttttttttagattttgagaagtaaggttttaaatagagaggatagagattgtgttttattttttgggggaaggaattattttttttgggtaggtatgggggttgggtgttaggaaaagggttaggggtttagttttggaattagattttaggaagtttttttaggaaacgtttttatgttattgtttttggtttattagaattttttgaggtgtatagttttatatagtaagatgggcgtagttgtttttgtattagttcgtgttatgttgtgtgggtttttaagggtttgtttgtttatttatttatttatttgagatagggttttgttttgttatttaggttgaagtgtagtggtacgattatagtttattgtatttttaattttttggatttaagtaatttattttaattttttaagtagttggggttataggcgtatgttattatgtttggttaattttttaaatttttttgtagagatgggggttttgttttgttatttaggatggttttgaatttttgattttaagtaatttttttattttttaaagtgttgggattatatgtgtgagttattatgtttagagggtttaatttttttttttttttttttgaaatgaagttttattttgtggtttagattggagtgtaatggcgtggttttggtttattgtaatttttatttttttggtttaagtgatttttttgttttagttttttaagtatttgagattataggtgtttattattatgtcgggttaatttttgtatttttagtagagacggggttttatcgtgttggttagtttggtttcgaatttttgattttgagtgatttatttgttttggttttttaaagtgttgggattataggcgtgagttatcgcgtttagttaattttgttttttttttaatttagtttttaatattaaaaaattgatatttataaaattgatttttttatttttttagacggagtttcgtttttttttttatgttggagtgtaatggcgtaattttagtttattttaattttcgttttttgggtttaagcgatttttttgttttagttttttgattatttgggattataggtatgtgttattatatttggttaattttgtgtttttagtagagatggggtttttttatgtcggttaggttggtttggaatttttgattttaggtgattcgtttattttagttttttaaaatgttgggattataggcgtgagttatcgcgtttagtttataaaattgattttttaaaaaaaattagaatatttatcgatgttggatttattttttttatttttagggtttattttttaggtggttatagtgtttgtttggtttttgtagtatttgagtttgtaattttgtttttggagttaaatatgttttaggagttttgggattttgattgatgttattgttaatttgatgaaagaaaaattatttttgggatttgtgtttggtgttttttaggtgttttggttttgggattttgttgttgttttgttttgtttttgtttttttgagatagagtttcgttttgttatttaggttgaagtgtaatggtattatttcggtttattttaatttttattttttgggtttaaacgatttttttgttttagttttttaggtagttgggattataggagtgtgttatcgcggttagttaatttttgtatgtttagtagagatagggttttattatgttggttaggttggtttcgaatttttgggtttaagtaatttatttatttttgttttttaaagtgttgggattataggttgagttattgtgtttggttaggtgttttgtttttgtttttgattttttagagatgtggtttcgttatattatttaggttggtttcggatttttggttttaagtaagtttttcgttttagtttgtttagtagttgggattataggtgcgagttattatattcggtttttaggtgttttaagttttaaggcgaagagagatatgtaatttaataagttagtattgtttttaagttagagtgagcgatgaattgaaagttgaagcggggaggggttttggaaattatgatattttttattttgttaattaggaggagagttgagtgtttagggttagggaatttatttttgaaagggatttttttattttatattgttttaggagtgtattaagtttttttaaaagtggatgtgtcgatgtgtttcgatttttgggtaaaagtttttttattagtaaaagaggttattttagggatattgggggagtttaaaggtttggatttttttataggattatttaaattaggttaaatgaagtttgagtatttgtttaattgtttaaagaagatttattggatatttattgtaaggtagatattaatttttttttgagaatgagaggtgttttttttagggttggtttttggatttaggtaggtttaggagagacggtgattatagtcgttatgtggtaatagtaatttttaaaagagtatcgaaaggcgttagggtagggtgagttagtaagtagagtagatattaaaaatttaaacggggttgggtgtagtgtttcgtgtttgtaattttagtattttgggaggttaaggtgagttgatggtttgagtttaggagttttagattagttttagtaatataatgagattttaattttatttatttatttatttgtttttagacggagttttgttttgtcgtttaggttggagtgtagtggtataattttagtttattgtaagtttcgtttttcggatttacgttatttttttggtttagttttttgagtagttgggaatataggcgttcgttataacgtttagttaatttttgtatgtttagtagagatgtagttttattatgttggttaggttggttttaaatttttggtttcgattttttgatttcgtgatttattcgtttcggttttttaaagtgttgggattataggtttgagttantgcgttcgttttttaattttatttaaaaataaaaaatttaaatgtttttagttattagtttatatacgggattaatggtttgggagtaagacgggagggagaagggattttagaggtttttgagaaatttttgaagagaagttaaaaaataattcgatttttttgtgattttttgatttttaaattgatgataaagttttaaaatttaagaattttagtcgggcgcggtggtttacgtttgtaattttagtattttgggaggcggagacgggcggattacgaggttaggagatagagattattttggttaatattgtgaaatttcgtttttattaaaaatataaaaaaaattagtcgggcgtggtggcgggcgtttgtatttttagttatttcggaggatgaggtaggagaatggcgtgaattcgggaaggggagtttgtagtgagtcgagatatcgttattgtattttagtttggggggcggagttagatttcgttttaaaaaaaaaaaaaaaaaaaaaaaaaagaattttatataagttagtaaaatatatttgttgtttgtatttaatttataggttatttgtgtagggacgtatttattttttagtaattgattataggtcgggcgcggtggtttatgtttgtaattttagtattttgggaggttaaggttggcggattatttgaggtagggagttcgagattagtttgattaatatggagaaattttatttttattaaaaatataaaattagtcgggcgtggtggtatatgtttgtaattttagttattagggaggttgaggtaggagaatcgtttgaatttgggaggtagaggttgcggtgagtcgagattacgttattgtattttagtttgggtaataagagtgaaattttattttaaaaaaaaaaaaaaaaaaaaaaaagaattgattataattggggttaggtatagtggtttacgtttgtaattttagtattttgggaggtcgaggcgggcggattatttgaggttaggagtttgagattagtttgattaaaatggagaaatcgcgtttttattaaaaatataaaaattagtcgggtatggtggtgtacgtttgtaattttagttattcgggaggttgaggtaggagaattgtttgaatttaggagacggaggttgtggtgagtcgagatggtgttatttattgtattttagtttgaataataagagttaaatttcgttttaaaaaaaaaaaaaaaaatggaaggaaagaaagaattgattataatgtataaagtcgtttagtagagtttcgagtatggtaaataataaatgttaatt

SEQ ID NO: 251 - DNA, 6419 bp, Artificial Sequence
  chemically treated genomic DNA (Homo sapiens)
tttagaagtcgttttaacgtttttattaaaggtttagtattaattttgtaatttggaagttgagtaaattttttcgttttttagtatttagtatgagttatattttcgggagggggaggtttggcggtagttgtttttcgtttttttttcgttgttttcgttttttttttttttttttttcgttttttattcgtttttgttagtaggtaggaaggaagttgtttatagtgtaagggtggggtatttttagtttatattgaatagtttcgggttgggttataaagagttagggattttcgtttagttatttttgtttttattatttaggtttttatgtatatattttaggtttaaggttttttttttttagtatagttttttaaggttaaggcgtttttcgtttagttttgtagagtattttggtttgagagggaaggtaggggtaagatttgtcgtttttttggtattatggagggggtagggggtatagggtatagttttttttagggagggatttttatttatttatagaaggttgttattttatttttggggtttgggttagtttttttcgaggcggaaatatagttattgttagggataagggggtttagtttttaattagattatttttaaagtttatttagttttagattttatgattgaagatggaaatttttttagtcgaatattaaatttttaattttgaaaattgttttttcggaaagttttttttaaaatatggttattaatatgagtagttagttattaagatgtatgggtattatttttggtagggttgtaggtatagagtaggttagtattaggtagagttttggggacggtaggtttttttcgataggcgggggaattaattgtttttattagagtattttgatggaaggtaggatatttcggataatattggttacggtttaagaaaggggaagtagggaattttttgtttagagagtatttatttttgattttttttgtttgtttaatttttttttttttttttttttttaagattttgttatggtattttttgttttaatttaaatttaatttaggtttattttgatttttagtttttagcgttgattgtattgaattggattttattttttttgtgatttttagtttttagtgttggttgtattgaattgtaatttattttttttgtggttatagagtgtttttttttgtattttttttttttatttagattgatttttttttgtttatatagatttatttagttttagttaattttttttttagtggattttttttattgtttttagagtatagtttttagtttttaggcggttgtatatatttgtaataaaataagttaatgtatgaagtaattttatttagtgtaggagtttaatttagtagaggatttttatagagaggaattgatttgtgttttttagagtatataggtttagagtatataggtttatttaagtgagaatttatatttatagagtaagttgtttaaaaattacgattaggagggtttagagaaagagttgttttcggggttttggggatagggtgatagttatttagagattatggagaaggggacgtaaggaagattttatagaggagttattttgcgattgtgttggttgggttttttaggaagtagagttttaggagttggaagtataagaggaatattgcgggtaatgtttgagaaagataatagggatcgggagtaggagtgagttgggtaggggaaggattaggtttataatgttaggtttatatttgtagaggagggaagaagaagaagggttttatattagtttagcgggggatgttacgtttatagacgtttcggggtttagttattgtttaagtgttagaaataaattttcggtgttataaaagaaatagtatttagatataaatgtttttagtaaggtaattttatttttatagaagggtgtattttatagatggagtaatggtaagagtatatttgaataagggaagggaaggggtttttatttttaaggtaggtagtttttatagttgtgttgtttttttattggttagggttggattatatcgtttgagttaattgttattggttattttaaagagagtaggggtaagagtcggattggtagggtaagtagtttggtaggaaggacggttatagaataggtgatttaggatgatttaggttagagtaggtgattagtggtgatttagttcggagtaggtgatagaagttaggagggggttgtttattgaaattaggggtaaggagacgaagagaatatgaaagttaaattttaagatgaagaataaagttgaatatattgatgtattggatttttggagaggattttagaatttattgtatttaatttataggttaaaattttagaagaggaatttattatattttatataagattttagggaagtatatggttttggattgaaggttggtatttggaagttgttagttattagtattttttgtagtaggtatttgttttttaagagggaggtttgggtggtgtatttttagagttgtttaggttgggttttaaggaagaaaaagatttttatttgttagaggcggaagggagaggtggagggaatagtatagtagcggtttaggggtagggaagtataggattattagggagatacgagaaagtttatttgtttagaatagaggatttaagtagtgtattaaggaaaatgagggttaggttaatgtgttggagtggttttgtttttggttgagggttttgggtagtgttaaagcgtaaggtaagttttgttttttagaagaatttagtagagtgtggagtttagatgggattggaaggtttgggaggggttaggtggttatagggacgggttatagttagtggtgtaggtaagaagataatggttatttatggtggtttatatttggaattttagtttattgggaggtcgaggtaggtggattatttgaggttaggagttcgagattagtttggttaatatggtgaaattttgtttttaataaaattataaaaattagtcgggcgtggtggtgggtatttgtaattttagttatttaggaggttgggttaggagaatcgtttgaatttaggaggcggaggttatagtgagttgagatagtattattgtattttagtttggataataaaagcgagattttgttttaaaaaaaaaaaaaaattagttaggcgtggtggtgggtgtttgtcgttttcgggaggttgaggtatgagaattatttcgggaggtagaggttgtaatgaattaagattatattattgtattttagtttgggtgatagagtaagattttgtttaaaaaaaaaaaaaagatagaaggatgttagtatttgatgttgtttgttattttgattttgaggatgttagttatagttttattaattgggatttaggaaaatgagttatttttggttatgtatattttaaatggtggtttaatatggaagttagatttgggatttgttgttttttttagtatggtagaagatgtttgaaaagtaggggttggattttattttttgttttattgggaaggcgaggtggtggggtgtggtggggttttaggtttggggttatgggataaagtttaggttgaatgtcgtttttttatttttttttttttgagataggggtagtagggtatattagtgtttaggagtagtttatgaggtttttttattttttattttttaaaattggtagattttatttttttggtgtgattttagagttttgagtatagttcgtttttttcgtttgtcggttttttatttaggtttattttaattttattttttattgttttttagaggagtttggttaatataaatttttttgtttgtttgtttgtttgtttgttgtttttagtttttgttttttttagttttttagttttcgttttttttttaaatttttttttagtttttgaggtttcgaaattacgaggtttcgatttttgtggattagatgtttagttagtggtttttttttagttttttagatggtatagaattataaattttagtatgtattttggtttgaagtgtttggagagtgttggtgtattttatttgtattttgggaattgtagtttttttagttttttatgtttttattagggtattaagtttttttttggtcggttgattttgttttagttttagtttttttgttgatttgcggtttcgggaagcgtgcgttattgaatgatagggtgggggtggaggtattggaaggtagttttttgtttttttgtgttttttatttgagttatgggggtgtgggggttttaggaaattggggttgggaggggaagggatattttaatgttagatttaaggataaaaagttattatatttttgttgggtttttatttttaagaatttaaaaggatttaagggtggggatttaggagtttttgtatgtatggggggaggtgaaggagagaatttgtatgattttagaggtttttgtggttattgagagtgtgggttgttattttttgttatagaaacggtgtttattttttgtttaattttttagggaaaggtatataggggtgaggtcgaaggttttttcgtttggtgttatattatagaaggatttttatgattttttggtggttttattttgttattttttaatgttttagtttttatgttgtagttttagggttttgttggatatttgggtttttatttattagttttagtttttatagcggaatttaggcgttcggttttttattttttaggttagcgggcgtggagttgaggttttagagttttttagtcgggtttgtttttgttttattgtgtatgggataggggcggggcgagggttagtattggagagtttttttttattgtttttttttttcggttttttttttttttttaaggaaaaggttagggttttgttggagtaggtagtagagtggacgtatagtaatatgggtaatttgaagagcgtggtttaggagtttgggttattttgcggtttggggttggggttgggttttgggttgtgcggtaagtagggtttagttatttcggtttttgagtttagtcgggttttagtatttttatttttattagcgttagaatataggtaagggttaggtagttaggagtaggtgggtaataagggtggtgttaaggtttgaagtttggggttgggaaggtttggaatttgtagttgagtcgggagggttaggttataaatgtaaaagggttattaatgtgtatagaataggatagtttgggaggtttagaaaggagattaggattagagtcggtaggtgaaagttgggagtaagggtgttagttatagaatttggttagggtttgaatgttgttttgtcgttaggagttgtttgattttgagtaagttatttaatttttttgaatttttatttatataaaacgagatatggtaatatttattttatggggaagtaagtttttagtttatagtaagtttttaatagtagcgatgattatttagttggagaagaaaggagttgatagtagtggttataggagtgagaaagtggggttttttagaagagggagagagttgggtaggaaattcgggtttttggggtaagtaggttgagaagatagagttattaggttttttttttttgttttagtttttttttttcgtggttgttattcgaaaattggattatgtagtttttataagagttttttcgggggtagaggttttaggagggaggaaagattcggaggtttggtggggtgttaggtcgggggtaggttggggttgtaggtagttatgtagggaaggttgagggtcggggttttgttgtttaggcgtatttttggtttgagtttttttttttttttttgtcgttggtggttttgggaggaagtgataaggtttgcgaggtttttttttatatatggggttgttgttaggaggggttgtgagtgcggagggaaattagagttgaggaatttttgtagggtttttttttatttaagtattaggttttgttttttttagggtagggtttatagtagttttgcgggggtggatattttatttttagaagaggtgaggtgggcgttgtaggtgggatgcgaatttagtttcgggttaggggtttaggagtttagtattagtagtttttgtagtttaggattttggtttataaacggaggtatagttcgtttttagtttttaaggtatggggaacgttagaaggtatgcggtaggtgggttgtgagatcgttagtgttgtaataggggttttcgggtgatatttgggaaggttgaaaggaaataaattttttttgatgattttatttttggtttttaatagt

SEQ ID NO: 252 - DNA, 6419 bp, Artificial Sequence
  chemically treated genomic DNA (Homo sapiens)
gttgttgggagttagggatagggttattaggaagggtttgtttttttttagtttttttagatgttattcggaggtttttgttatagtattggcgattttatagtttatttgtcgtatgttttttggcgttttttatgttttaggagttagaggcgagttgtgttttcgtttatagattagggttttgggttgtaggggttgttggtgttgagtttttgagtttttgattcgaggttaagttcgtattttatttgtagcgtttattttattttttttggagatggggtgtttattttcgtaaagttgttataagttttattttgagggggatagagtttggtgtttgagtggagggaagttttgtagggattttttagttttgattttttttcgtatttataattttttttgatagtagttttatgtgtgaagggaagtttcgtaggttttattatttttttttagagttattagcggtagggaggaagggagggatttaggttaagggtgcgtttgagtagtagggtttcggtttttagttttttttgtatagttgtttgtagttttagtttgttttcggtttggtattttattaggttttcgggtttttttttttttttgggatttttattttcgggaggatttttgtgggaattgtatggtttagttttcgggtgatagttacgaggagagggggttggagtaggggaaaaaagtttggtggttttgtttttttagtttgtttattttaagggttcgagttttttgtttaatttttttttttttttgggagattttatttttttatttttgtaattattgttgttagttttttttttttttagttaaataattatcgttgttgttgaaggtttgttgtgagttagaaatttatttttttatggagtaagtattgttatatttcgttttatataaatggaggtttagagagattaagtaatttgtttaaagttaaatagtttttggcggtagagtagtatttaaattttggttagattttatagttggtatttttatttttagtttttatttgtcgattttgattttggttttttttttgagttttttagattgttttgttttatgtatattaatagtttttttgtatttgtgatttggttttttcgatttagttataagttttagatttttttagttttaggttttaggttttgatattatttttgttgtttatttgtttttagttgtttggtttttatttgtgttttggcgttggtgggagtagggatgttggggttcggttgggtttaggggtcggggtggttgggttttgtttgtcgtatagtttaaggtttagttttagttttaggtcgtagggtggtttaggtttttgggttacgttttttaagttgtttatgttattgtgcgtttattttgttgtttgttttagtagagttttggttttttttttaggaagagggaggggatcgagaggagggggtagtgggagggggttttttagtgttggttttcgtttcgtttttattttatatataatgggataggaataagttcggttgggaggttttaaagttttagttttacgttcgttggtttgaagggtggggggtcggacgtttgggtttcgttgtgaggattgaggttgataagtgggagtttaggtgtttagtagagttttggggttgtagtatgggggttggggtattggggagtggtagggtagagttattagggggttataaaggtttttttgtgatgtggtattagacggaagggttttcggttttatttttgtgtgtttttttttggagggttgggtagaaggtgagtatcgtttttgtagtaggggatggtagtttatatttttagtgattatagggatttttagggttatgtaggtttttttttttatttttttttatatatataagaatttttggatttttatttttgagtttttttgggtttttggggatagaggtttagtaaggatgtagtgattttttgtttttgagtttgatattagggtattttttttttttttagttttaattttttggaatttttatatttttatgatttaagtgggggatataaaagagtaggaagttgttttttagtgtttttatttttattttgttatttagtgacgtacgtttttcggggtcgtaggttagtagagagattagggttgaggtagggttagtcggttagggaagagtttgatgttttggtgggagtatgggggattagggaaattatagtttttagaatgtaggtggggtatattagtattttttaggtattttaggttagagtgtatgttggggtttgtagttttgtgttatttgaggggttggagaaaggttattagttgggtatttggtttataggggtcgaagtttcgtgatttcgagattttagagattgagagaaagtttaagaaagaaacggaagttgagagattgggagaggtagagattaggagtagtagatagatagataaataaataagaggatttgtgttggttagatttttttgaaaagtagtggaggataaggttggggtgggtttgggtggggggtcggtaggcggaaggaacgggttgtgtttagagttttggggttatattaagaaggtggggtttgttagttttggaggatggagggtgaaggggttttataagttgtttttggatattagtgtgttttgttgtttttgttttaggaggagggagatggaagggcggtatttagtttgggttttgttttatgattttaagtttgaggttttattatattttattatttcgtttttttagtgaggtaggggatgggatttagtttttattttttaggtattttttattatgttggaggagataatagattttaagtttggtttttatattaagttattatttgaaatgtgtatgattaaggatgatttatttttttaggttttagttaatggagttgtgattggtatttttagggttaaggtgataggtagtattagatgttgatatttttttgttttttttttttttttagatagagttttgttttgttatttaggttggagtgtagtggtgtgattttggtttattgtaatttttgtttttcggagtgatttttatgttttagtttttcgaggacgataggtatttattattacgtttggttaatttttttttttttttgagatagagtttcgtttttgttgtttaggttggaatgtaatggtgttattttagtttattgtaattttcgttttttgggtttaagcgatttttttgatttagttttttgagtagttgagattataggtatttattattacgttcggttaatttttataattttattagagatagggttttattatgttgattaggttggtttcgaatttttgattttaggtgatttatttgtttcgattttttaatgggttgggattttaggtgtgagttattatggatggttattgtttttttgtttgtattattggttgtggttcgtttttgtggttatttgattttttttaggttttttagttttatttgggttttatattttgttagatttttttggaaagtagggtttattttacgttttggtattatttaaaatttttagttaagaataaagttattttagtatattggtttggtttttattttttttggtgtattgtttgaattttttgttttagataaatgggttttttcgtgtttttttaatggttttgtgtttttttgtttttgggtcgttgttgtgttgttttttttatttttttttttcgtttttgataaatgaaaattttttttttttttgaggtttagtttgggtagttttggaggtgtattatttaggttttttttttagagagtaggtatttgttgtagaaggtgttggtggttgatagtttttagatgttagtttttagtttaaggttatgtgtttttttggagttttgtgtaggatataataaattttttttttaaggttttagtttgtaaattaagtataatgagttttgagattttttttaaagatttaatgtattagtatgtttagttttgttttttattttaaagtttaatttttatgtttttttcgtttttttgtttttagttttagtaaataatttttttttagtttttattatttgtttcgaattgagttattattggttatttgttttgatttgagttattttgagttatttgttttgtgatcgttttttttgttaaattatttattttgttaattcggtttttatttttgttttttttaaaatagttagtaataattagtttagacggtgtggtttaattttagttaataggggaataatatagttgtaggggttatttgttttagggataaaaattttttttttttttttgtttaggtgtgtttttgttattgttttatttgtgagatgtatttttttatagaagtaaaattgttttgttgggaatatttatatttgagtgttattttttttgtggtatcgaaaatttatttttaatatttagatagtaattgagtttcggggcgtttgtgggcgtaatatttttcgttgggttgatgtgaggtttttttttttttttttttttttgtaggtgtgagtttggtattgtgggtttgattttttttttgtttaatttatttttgttttcggtttttgttattttttttaggtattgttcgtagtattttttttatgtttttaatttttgggattttgttttttgaaggatttaattaatatagtcgtaggatgatttttttgtgaggttttttttacgtttttttttttatgatttttgggtggttgttattttgtttttaaggtttcggggatagttttttttttgggtttttttggtcgtggtttttgggtagtttgttttgtaagtgtgggtttttatttaaatgaatttgtgtgttttgaatttgtgtgttttggaagatataggttagtttttttttgtggggattttttgttgggttgagtttttgtattgagtgggattgttttatatattggtttgttttgttgtaaatgtgtgtagtcgtttggggattggaagttgtgttttggaggtaatggagagggtttattgagaagggaattggttgaggttagatgggtttgtgtgggtagaaagaagttagtttaggtgaaggggaggagtgtaagaaggagtattttgtggttatagggaggatgggttatagtttagtatagttagtattgaaggttgagggttatagggaggatggggtttagtttagtatagttagcgttgaaagttgagggttagagtaggtttggattgggtttgaattggggtagaggatgttatggtagggttttaagaaaaggaggaaaaaaaaaagttaaatagatagaaaaagttagagatgaatgttttttggataggggattttttgtttttttttttttgggtcgtggttagtgttgttcggagtgttttgttttttattagggtgttttgatgagaatagttgattttttcgtttgtcggaggaggtttgtcgtttttagggttttgtttggtgttggtttgttttatgtttgtagttttgttaagaatgatgtttatgtattttagtggttgattgtttatattggtaattatgttttaaagaggatttttcgaaaaaatagtttttaaggttggagatttggtgttcggttgaaagaatttttatttttaattatgagatttgaagttgaatgggttttggagatgatttggttgggaattgagtttttttgtttttgatagtggttgtgttttcgtttcggggagggttggtttagattttaggggtaaggtgatagttttttgtgggtgagtagggatttttttttggggagggttgtgttttgtgttttttgttttttttataatgttaaagaggcggtaaattttgtttttgtttttttttttagattagagtgttttgtagggttgggcgggggacgttttgattttggagggttgtgttgggaagggaaggttttgggtttggggtgtgtgtatgggggtttgggtggtgagggtaggggtgattgagcggaagtttttgattttttatagtttagttcggggttgtttagtgtgagttggaagtattttatttttgtattatgagtagttttttttttgtttgttggtaaggacgggtggggagcggggaaaggagggaagggaggcgggagtagcgggagaggggcggggagtagttgtcgttaggtttttttttttcgaggatgtaatttatgttgagtgttggggggcggagagatttgtttagtttttagattgtagaattggtgttgagtttttggtgagggcgttggggcggtttttggg

SEQ ID NO: 253 - DNA, 5377 bp, Artificial Sequence
  chemically treated genomic DNA (Homo sapiens)
gtttagtttttttttatggggtaaattttattttcgttttagtttttggggtttagagtttttggtttagatgttttttgttattttatttttattttgtttggttttttttgtttgttttaggattgttttataaagagggatgtggttggtttttaattttatgaatgttggttgaggatgtttgcggaatttgtagtgaagtttttaggggttgttcgggttttggttggtaggtgaatattgtttattttgtcggttgggatatagtgattttgggtagttgtgtaagagaggggtttttggtagataaataggtttttttttgttggtgggttagttagtaggttagtgggaaggttaaaggttatggggtttgggagaaattgggtgaggagtttagttttatttttcgtaaagtttttgggaagtatttttttattggggtagtttttgatattagggtatttattaattttttgggtgttagggaaagggtaggaggtgagtgttgggaggtagttgaggttaattttttttgaatttttacgtggtatttatttagagtaattggtgttagaggtttagggttttggagtataaagtagaatgtttgttttttgtgtttagacgtgagtaggtgagtagttggggtagagggatgggggttatagttttaagggagggtattgtaggtggttttaggggagagtttggggtggtttttaagacgtttttttggaatattttggtagagttgttttttcgtttttattatggtttagtttttttattatgaaatgggagggagggagataggtgggtaggggagaggtggtagaagtggtttagagaattgtttttggggtttgggatttttgcgaaggggttagagtattacgttttttgttatgtgattgaggtagtaagagtacgttttttttttatgtttgaggaagatattttagtttttttgatttatttaggttagtttttttgagttttaatagttttgtgttttttagtttaaggaaggggtaataggatttcgggtagttgtttttgtagaggttttttgggtaagttttttgcgttatgttttttcgtttttttttttttttaattaggtttttttttatttgtttttttagagtaggtaatggtaagtatggttgtcgtgtttatttgggttttggttttttttttaggtgggttttcgattttgattttaacgtgggggtgtgggtggaggttggttagagggttttgtttattttgggggaggagagtttaggttttgattatttagtttttttttatagcgttttcggttatttaggtacggaaaggtttttgggattattttagttagattagcggggataaaggtagggtggagtagatttattagtagaagatggttcgcgagttcgcgtgagtgtttaggggaaggggtgtaggcgaagggaggagatagttgggttatgttatgatgatttgtttttgttgttttaatttttgtggtcgttgttgggatagaggaaaggagcggtgttagttttgtttgtagatttcggttattttgggttttttagcgttttttgtttgtagttttcgttttgataatttcgtagttgttgtttttttgtttattgaggcgcgggatttgggattaatcgggaggacgttcgttgtagtttttagaattaaaggatgatgtggcgtatttatgtttttttggagagtgttgtaggtttggatttgtatgggtaatgtgtttgtgtttcgtgcgtgagttgttattggttagggttaggataagagttttcgattttggggttaacgttttgcgtttttggtttttttagaggattagtgcgcgatgatttggggataaaggagatgatgggggttagtagtttgacggtttggatatttgtttttttttttaggattttgaaagatagttttgagtaagattttaataatatgaataagtttttggaaaagttgaggtttttgagtgggagcgaggtttttcggtttttataggattcggtgggtatgcggcggtagttgtaggaggagttggaggaggtgaaggttcgtttttagttttatatggtagaggcgtacgagttggtgggttggaatttggagggtttgcggtagtaattgaagttttatacgatggatttgatggagtaggtggttttgcgcgtgtaggagttgtaggagtagttgcgcgtggtgggggaagatattaaggtttagttgttggggggcgtggacgaggtttgggttttgttgtagggattgtagagtcgcgtggtgtattatatcggtcgttttaaagagtttttttatttatacgtcgagagtttggtgagcggtatcgggcgttacgtgtaggagttgtatcgtagtgtggtttcgtacgttttcgttagtttcgcgcgttttagtcgttgcgtgtaggtgttttttcggaagtttacgtttaaggttaaggttttgtacgtacgtatttagtagaatttggattagttgcgcgaagagtttagtagagtttttgtaggtattgggattgaggaaggggtcggttcggatttttagatgtttttcgaggaggtgcgttagcgattttaggtttttcgttaggatatttatttgtagatagttgtttttattcgcgttatcgattaggagattgaggaggtttagtagtagttggcgttatttttattaggttatagtgttttcgttttagagttttaataaatagatagtggtaaggttttgagtaagttgtaggttcgtttggatgatttgtgggaagatattatttatagtttttatgattagggttatagttatttgggggatttttgaggatttatttgtttaggtttatttttagttttttgtttggggagttttggttttgagtttttagtatggtttagtttttgaaagtggtttgttgggtggagggtggaaggttttgtgtaggatagggaggttattaaaggggttgttgttttttgtatatttagttttttgcgattttttaatttggatgtattatatttattaggttttgtaaatttagttttttagtgtttatttgggaatgtttatgagttattttatttaagggtgagggagtagggagggagaggtattatgtatgtgggtgattatttgtaagtttgtttgtcgtgatgttggaagtttgtgttattatattttggagtttggttttagttatttttggttgtttggtggttattgttatagttggtttatagagaggagtatttgtttttttagggttgttatggtagttattaggggaatagaagggagaaagagaatattatggggagaatatgtgatggtgtgtgaatatttttgttggttttgatgttggtgggtacgaaaggtgtgggttgtgataggagagggtagagtttatgttttttgatatagttttatatttaaataagggattgaatttttttaattgtgggagttttttaaattttttggggagtatattgtgtgttttttttatttttagtttttttttttgggtttttaagttgaagtttagatttttggtttaaatgaaatagatgtttatgatagaagtttgtttggcgtgatttttatttggattatgtttgaaagtagtggttttattattatttttaaagtatatttattatttattttatttttttgttgtttttttttatttatttatttttagtttaggtttgttaaagggggtttggttgggttttgttttagggattttggttagataacggttgtttgttatatttggtaggagggtttgggttacgggttttttttttgtatttgtattgtttattagtttgtttttttataggatattgtgtatggaatgtaggttgtgtttggaagagttgtggttttggtggatttaagatttttgaggtgggttgttttttttgtttttgttgttttagagtttgaatggtttttttttatgtcggatttttttttggggattttttttatttaggggtattaatgttttttatagattttttgggaattgaaattggggtgtggtggaggacgtggaaagggtaaatatagttttttgtttttggatttttttgttcggttttttttttttttagtttagtttattgttttcgggtttttagtatttgtttgttttttaattttatagtatagattttatatatatgtaggtttattatgtttgtaggttggttttttttgatatcgtggattttgataatgttggtaatagaattgggttgtggatttagtatttggagagaggaagtgttagaaaggtagaaataataaaaggtgtttttgttgttgttaggaaattggaaaagtataggttaagggttatgatggggatgaggaggtaggagtgaaaatgagggttgtgtatttgaggttgggattggggaaggtagtgatgaggatagaatagggagtgggaagaatagaaagggatagagggatttagggattgtgagagaggggaagaggttgagttattcggaggggcgatttagtacgtaagtagtatgtggtttaatattggaattaagtagttcggtttcgggcgtatttttttagggattttttagggataagtttagttttttgtcgttaaggtttttgtagatcgacgtagggattaatagaatttcgtgcggtggagttattgtgaaggagtaaaaaagtgttttggttttaagaggacgttttaggggaagtgacggttgagttgaggtggattcggttggcgatgtaaggttcgagttatataaattcgggaatcgggagtttttgacgatattgtttttcgagtgttcggagtttgcggttttttttggggtggtggtagttggcggaagtgacgggagaggggtggggtcgcgagagcggcggaagtaggaagtcgaggtttgaattgcgcgtggtggttatggcggttagcggggttgtggaattagggttttcgggggttgtcgtcgtttcgtcgttcgtttcggtttcgtcgtttgtttttgattatttgtttcggtttattagcgtcgaggacgaggagtagtagtttatcgagatcgagtcgttatgtatgaattgttattgtaatgtgaggcgggggcgcggtcgcgagcggcgggtgggtagggtttgtgtcgggacgagtcgggggttagatttagttaggtgggttcggtcggggatttcgaggagcgttcggagatagtagggcggggaaagggagttttattgatttttttttttagttattttttattttattagg

SEQ ID NO: 254 - DNA, 5377 bp, Artificial Sequence
  chemically treated genomic DNA (Homo sapiens)
tttggtgaagtagaaagtagttaaggaaaaaaattaatgaaatttttttttttcgttttattattttcgggcgtttttcggggttttcggtcgggtttatttggttgggtttgattttcggttcgtttcggtataagttttatttattcgtcgttcgcggtcgcgttttcgttttatattgtagtaatagtttatgtatagcgattcgatttcggtgggttgttgtttttcgttttcggcgttgatgggtcggaataggtgattaggggtaggcggcggggtcggggcgggcgacggggcgacggtagttttcgggggttttggttttatagtttcgttggtcgttatggttattacgcgtaatttagatttcggttttttattttcgtcgttttcgcggttttatttttttttcgttattttcgttagttgttattattttaaaaaaagtcgtagatttcgggtattcggggaataatgtcgttaagggttttcggttttcgggtttatatggttcgaattttatatcgttagtcggatttattttaatttagtcgttattttttttaagacgtttttttagaattagggtatttttttgtttttttataatagttttatcgtacggggttttattggtttttacgtcggtttataagagttttgacgataaggggttggatttgtttttgaggaatttttgagaaggtgcgttcggagtcgggttgtttggttttagtgttgggttatatattgtttgcgtgttaggtcgttttttcgggtggtttagttttttttttttttttataatttttgaatttttttgtttttttttgttttttttattttttattttgtttttattattattttttttaattttagttttaagtatatagtttttatttttatttttatttttttatttttattatagtttttgatttatgtttttttagttttttaataataataaaaatattttttattatttttatttttttagtattttttttttttaggtgttgggtttataatttagttttgttgttaatattgttaaaatttacggtgttagggaagattagtttgtaggtatgatgagtttatatatgtgtggggtttgtgttatggggttggggagtaggtaggtgttgagaattcggggatagtaggttgagttgggaggaaagggggtcggatagggaagtttaaagataaggagttgtgtttattttttttacgttttttattatattttagttttagtttttaggggatttatagggagtattggtgtttttgagtgaggggagtttttagaagagagttcggtataaaaagaggttatttaaattttagaatagtaggaataaaggaggtagtttattttaggaattttaggtttattagggttatagtttttttagatatagtttgtattttatgtatagtgttttgtgggggagtaggttagtgaatagtgtaggtgtagaggaagggttcgtaatttaggtttttttgttaggtgtgatagatagtcgttgtttagttaggatttttgaagtagagtttagttagattttttttgatagatttggattgggagtgggtggatgagaaagagtagtaagggaatggagtgggtgatgggtgtgttttggggatagtggtgaggttattgtttttagatatggtttaaatgagagttacgttaggtaaatttttattataaatatttattttatttgagttagaagtttaggttttaatttgggaatttagagggaggggttggagatggggagagtatatagtatgttttttagagggtttaaggagtttttatagttgggagggtttagttttttatttaggtgtagagttatgttaggaaatatgggttttgtttttttttattatagtttatatttttcgtatttattagtattagagttagtagggatatttatatattattatatgttttttttatgatatttttttttttttttttatttttttgatagttgttatggtagttttggggagataagtgtttttttttgtggattagttgtagtagtggttattaggtagttagaagtgattagagttaaattttaggatgtagtggtataggtttttagtattacggtaaataggtttgtagataattatttatatgtatggtgtttttttttttttatttttttatttttgaatggagtaatttatgagtatttttaaatgagtattgggaggttgggtttgtaaagtttggtgaatgtaatgtatttagattggggagtcgtaggaggttggatatgtaggagatagtagtttttttggtggtttttttgttttgtataggattttttattttttatttaataggttatttttaaggattgaattatgttagaggtttagagttaaggttttttagataaggagttgggaatgggtttgggtaggtagatttttaggggttttttagatggttgtggttttggttatgaaggttgtgagtgatgtttttttataggttatttagacgggtttgtagtttgtttagaattttgttattgtttgtttgttgaaattttggggcgaaggtattgtggtttggtggaggtggcgttagttgttgttggatttttttagttttttggtcgatggcgcgagtgaaggtagttatttgtaggtaggtgttttggcggaaagtttgaagtcgttggcgtattttttcggagagtatttgggggttcgggtcggttttttttttagttttagtgtttgtaaaggttttgttgagtttttcgcgtagttggtttaggttttgttggatgcgtgcgtgtagggttttggttttgagcgtgagttttcgggagagtatttgtacgtagcgattgaggcgcgcggggttggcgggggcgtgcggagttatattgcggtgtagtttttgtacgtggcgttcgatgtcgtttattaggttttcggcgtatgggtggaagagttttttgaagcggtcggtgtggtgtattacgcggttttgtagtttttgtagtaaagtttaagtttcgtttacgttttttagtaattgggttttggtgtttttttttattacgcgtaattgtttttgtagtttttgtacgcgtagggttatttgttttattagatttatcgtgtagggttttagttgttgtcgtaagttttttaaattttagtttattagttcgtgcgtttttgttatgtagggttggaggcgagtttttattttttttaattttttttgtagttgtcgtcgtatgtttatcgggttttgtgggagtcgaggagtttcgtttttatttagaggttttagtttttttaggaatttgtttatattgttgaggttttgtttaaggttgttttttagggttttggagaaggggatagatatttaggtcgttagattgttagtttttattattttttttgtttttaagttatcgcgtattgattttttgggggaattaaggacgtagggcgttggttttagggtcgagggtttttgttttagttttggttagtaataatttacgtacgaagtataaatatattgtttatataaatttagatttataatattttttaaagaaatatagatgcgttatattattttttgattttggggattgtagcgggcgttttttcgattgattttaggtttcgcgttttagtgagtaagggggtaatagttacggagttgttaaggcgggggttgtaggtagagggcgttaaagagtttaggatggtcgggatttgtagatagagttagtatcgttttttttttttgttttagtagcggttatagaggttgaggtagtagaggtaggttattatggtatggtttagttgtttttttttttcgtttatatttttttttttgggtatttacgcgggttcgcgagttattttttgttgatggatttgttttattttgtttttgttttcgttggtttggttgaagtagttttagaagttttttcgtgtttgggtggtcgaaaacgttgtggagagggattaggtaattagggtttgggttttttttttttagggtggatagggttttttggttagtttttatttatatttttacgttgaagttagggtcggagatttatttgaaagaagagttagagtttaggtgagtacggtagttatgtttgttattatttgttttgagaagataggtggagggaggtttggttaggggaagaaggagacgaagggatatggcgtaggggatttgtttagggggtttttgtaggggtaattgttcgaaattttgttattttttttttgggttggggagtatagagttgttggggtttaagaggattgatttaggtgagttaaggaggttagggtgttttttttaaatatgggaagagggcgtgtttttgttattttagttatatagtagggagcgtggtgttttaattttttcgtaaaggttttagattttaggaatagttttttaggttatttttattattttttttttgtttatttgttttttttttttttattttatggtggaaaaattgagttataatgagggcgaagaggtaattttgttaaaatgttttaagaggacgttttaggggttattttaggtttttttttgaggttatttgtaatgtttttttttaggattgtgatttttatttttttgttttagttgtttatttgtttacgtttgggtatagagagtagatattttgttttatattttagggttttgagtttttggtattaattgttttgagtaaatattacgtggaagtttaaaagaagttgattttagttgttttttagtatttattttttgttttttttttggtatttagagggttaatgagtgttttggtattaggggttgttttagtagagaagtgttttttaggagttttacgggggatggggttgaattttttatttagttttttttaaattttatgatttttaatttttttattgatttgttggttggtttattaatagagaagaatttgtttgtttgttaagggttttttttttatataattatttagagttattgtgttttagtcggtaagatggatagtgtttatttattagttagaattcgagtagtttttgaaagttttattataggtttcgtaggtatttttagttagtatttatagggttaaagattaattatatttttttttatgaaataattttggaataagtaagggaagttaggtagggtgaagatgagatggtaagaggtatttgggttagggattttgagttttaggaattggagcgaaagtgagatttgttttatgaggaaaagttgaat

SEQ ID NO: 255 - DNA, 5823 bp, Artificial Sequence
  chemically treated genomic DNA (Homo sapiens)
ttaggagatcgagattattttggttaatacggtgaaatttcgtttttattaaaaatataaaaaattagttgggtatggtggcgggtgtttgtagttttagttatagggaggttgaggtaggagaatggtgtgaatttgggaggcggagtttgtagtgagttaagattgtgttattgtattttagtttgagtaatagagcgagatttcgttttaaaaataaaaataaaaataaaaaaattaagtttgttaggagaatcgtttgaatttgggaggtggaggttgtagtgagttaagatcgcgttattgtattttaatttgggtaataagagcgagattttattttaaaaaaaaaaaaaaaggaaatataaaatgtagaaaattatttttatttatatatatatattttttgagatagggttttgttttattatttaggttggagggtagtggtataattttggtttattgtaatttttagttttattttttcgagtagttgggattatatgtatgtattattgtttttagataattttttgtatttttggtagagatagggttttattatgttgtttaggtttgtttcgaatttttgagttgttattacgttagttaatttttgtattttttagtagagacgggttttattacgttggttaagttggttttgaagttttgattttaaatgatttattcgtttcggttttttaaagtgcggttttttatcgtgtttggttagtttttatttttaggtgttaatatttttttatgattataaaaataatatgtgtttagtagaatagtttagaaaatataaggttgggagtggtggtttacgtttttagtaattttagtattttgggaggtcgaggtgggtggattatttgaggttaggagttcgagattaattatagttaatatggtggaatttatttgtattaaaaaaaatataaaaattagttggtgtggtggtatacgtttgtagttttagttattcgggaggttgaggtataaggatcgtttgaatttgagaagtagaggttgtagtgagtcgagattatgttattgtattttagtttgggagatagagtgagattttgttttaaaaaaaaaaaaaaaaagtttagtaaatataaaatgtagaaaattatttttatttatatatttatttatttttttgagatagagttttgttttatcgtttaggttggggatagtggtataatttcggtttattgtaatttttagttttatttttttgagtagttgggattataggcgtgtattattacgtttggataattttttgtgtttttggtagagatggggttttatcgtgttgtttagtttggtttttaatttttgagtttaagtaatttatttatttcgattttttaaagtgttgggattataggcgtgagtttttgcgttcggtttaaatttttttaaataaaaattttatttacggttaggcgcggtggtttacgtttgtgattttagtattttgggaggtcgaggcgggtggattacgaggttaggagattgagattattttggttaatacggtgaaatttatttttattaaaaatataaaaaattagtcgggcgtggtggcgggcgtttgtagttttagttattcgggagtttgaggtaggagaatgacgtgaattcgggaggtggagtttgcggtgagttgagattgggttattgtattttagtttgggcgatagagtaagatttcgttttaaaaataaaataaaataaaataaaatatatatatatatatatttgagagatgaagtttcgttttgtggtttaggttggagtgtagtggtttagttttagtttattataattttcgtttttcgggtttaagcgatttttttgatttttaaagtgttgggattataggagttattgtattaggtttattttattttttagagtagttttggtattattgtaaaattgagttgaaagtattaagagttttttgtatttttttttatatatagatatagtttttttattaatattttgtttagagtggtaaattttttgtagtgatgaatatatagtgatatattattaattaaaggttatagtttatataagggtttttttttggtgttgtatattttatgggttttaatttttttaaataaagattttattttttaagagtaattttagttttatagtaaaattgataggtaggttcggagagttttatatattttttttttttatgtagttacggtttttttgattattaatatttttattagagtggtaaatttgttaaaatcgatgaatttatattaatatattattattaattaaagtttgcggtttatattagagttagtttatttttggtgtttatattttgtatttttgaataaatgtatatttataagtatttattattatagtattatgagagtattttcgttatcgtaaaaattttttgtgttgtttgttattagttgttttttgtttttgtttttttaatgtggggttttgttttgtttggtttgagatagagttttcgtttgtcgtttcgggttggagtgtagtggcgttatttgagttcgttgtaatttttgttttttagtttaagtgatttttatattttcgttttttgagtagttgggattataggtgtatattagtatattttgttaattttttgtattttttgtagagaaggggttttattatgttgtttaggttggtttggaattttcgggtttaaaggatttaatcgttttggtattttaaagtgttaggattataggcgtgagttattgcgttagatttaaaatgtggttgttaatgattacgtttgttgtataattaaaattttttattattgggtatttagattgtttttttatttgttttaaagaggagaaaattaaggttttttatttgataagttatttgtttaaagttatttggttaaaaagtaggtagaattgatattagaaatttggtttgattttagaatttatttttaggttattatattgcgtttagaattaataatatattatttaatttcgttagattagttttttttaatttgaaagatagtgattaggtatttttataagtagagtagttaaggatttaagtatatgttgaggaaggtaggtaatatagaaaaaattaggtggtttaattgagatggaataagtagaaaatgtaaaggggaggtttaggaatagaaataaataggaggtaggagatgggtatatagaatgttggttaagataaagagaaagttggatttgggaaatttaaaagtaagaaattttggtttttatttttgtatgtaggagggagtaaagataattttaaggttatgtggggagttagtaaggataaggtttttgggaaaaggaatgagaaaagggagggtaaattttcgaggattataagagtaggagaggttttgtgtggttaggaggagaggttagaagttaacgaggtaggttagaataggtattggatattaaatttttttgtttttaaggagatttttttttagtttgagttttttttagtagttcggttattaaatgtttttagtttttaggggttgtggtgggaagtggggagcggggattgtaaagtgttttaattattaatataatgcggattgagaatggatgttggtataattttttaaaggtagtaggtttaacgttagtgttatttatttttattttatttttttagtttaattttagttatatttatatgttaaggattatttaggaggggggagcgtgtagcgcgtttgcgtgttcgtgcgtacgagaagtagagaggtagagaaggagataaaaagagatagggggagagagagagagagagcgagaagagagagatagataaggatagaaagggggttggaggagaaagagagagagagatatagagagagagagagagagagagagagagagagagagagagagagagagagagagagagagagagattagttttggtgagggaggaaaattttatagataatatagggagtttttgtaggaagatttagggagaagattttagaatttattttaagattgttgagagagtagggggtagttttgtaggatttggtttgggggttattaagtagtaacggttattgtataggcgttgttattgagttagagttatttaattcgatttgtgtggttggggattaagttttagatattttataattttgatttttagattgttttgggggtttcgtggttgtagataagggaaggaggggtacgtgagggttgggtttttgttttttttcgtttttcgttgttatttattattttaatagtcgtttagggggcgggattcggagaggtggggatgggggagggtaattttggtaggcgtttgttgtatggcgtaggtagggattattgaggggggcggacgtcgagggggtgaatacgagtgggaagttaagagagatacggggagggggaggggatcgggaattatttgaatgagaggaggggattacgggtagagtgggttttaggaggtagggcgagtagggtgtgacgggggttagatttttgagttaggtaaggggagtaggtgcgtagatttgtgttttttgtgggtgagcgtattcggtttttgggtggaaaggggacgtcgtttttttcggggggtcggttttaaagttttagaggttatttttttttttttaattaacggggtttcgggcgggggtttaggcgtcgtttttagtggttgtattttatttcgtaatttttaggcggttattggattgggagtttcgcgtcgggggtcggcgttgtttcgcgagtttttttttcgagttagttaatggggttggttgttggtatcgttcgttcgtttggtgtagagcgttgggcgttgcgagcggcgttgttatttaaaggggtcgcgatttttgtttcggttgttagggagggaggtagagaaggagcgcggggtcgtcgttgtttgtagttttaggtttgtagtttttgtattaattttgtcgtaggtaggggtcgggtttgtttaagtcgaatcgaatttgtaagcgggattttgtagtagtcgggaggcggtggtgggggggtttaaggagagatcgtagttttaaaatgtttttttgtaaatgtttgaggttgggggtgggtaataggagaagggaggattggaggagtaatgggaaagggggacggggttgaggaagtgggcgatttgaaaggtaattggggggaaggggttgcgaagggtagtttgtgggggcgggggaagggtcgagggaggatttagtaacgcggggagggggggtggggttagatagggtgggtaaagattggggagttggggggtttttgtagagtggggagggaatagaaattgagatcgcgggggcgggaaaggtttttggtggcgacggttttaggagattttaagggggcgtttagtttgagttgcggggggtaaaaggtaaggggggaagggaatgggagttgtagtcgagtaggggggtgggcgggtagaacgatcgattgtttggttagtgtgggtacggggttagggcggggaacgtttttttttattgggggcgttgtattggggggagtggttattaggattaaagttttcggaaatgtttgtagattgtggtggtgggggttgtttatgagaaatttaagtggatgatggggtgtgttttagagtttatataagaaggaatttaggttaagattatttttattgtttttttttttatttttaatttgtagt

SEQ ID NO: 256 - DNA, 5823 bp, Artificial Sequence
  chemically treated genomic DNA (Homo sapiens)
attgtagattaggagtagaagagggggtagtagaggtggttttagtttgaatttttttttatataggttttgagatatattttattatttatttggattttttatgagtagtttttattattataatttataagtattttcgaaggttttagttttaatgattattttttttaatatagcgtttttagtggggagaggcgtttttcgttttggtttcgtgtttatattggttaggtagtcggtcgttttattcgtttatttttttattcgattgtaatttttatttttttttttttttattttttatttttcgtaatttaggttgaacgtttttttagagttttttaaggtcgtcgttattaggagtttttttcgttttcgcgattttagtttttattttttttttattttgtaggagttttttagttttttagtttttatttattttgtttggttttatttttttttttcgcgttgttaggttttttttcggtttttttttcgtttttataaattgtttttcgtaattttttttttttagttattttttaggtcgtttatttttttagtttcgttttttttttttattgtttttttagttttttttttttttgttgtttatttttaattttaggtatttataggaagatattttggagttacgatttttttttagatttttttattatcgtttttcggttattgtaagatttcgtttgtaggttcggttcggtttgagtaggttcgatttttatttgcggtagggttagtgtaaaggttataagtttagaattgtagatagcgacggtttcgcgttttttttttatttttttttttagtagtcgggataggggtcgcggtttttttaaatggtagcgtcgttcgtagcgtttagcgttttgtattaggcgggcgggcggtgttagtaattaattttattggttggttcgaggagggggttcgcgagatagcgtcggttttcggcgcgagatttttagtttagtggtcgtttggaaattgcggagtggaatgtagttattagagacggcgtttgagttttcgttcggggtttcgttagttgagaaggaaaagatagtttttggagttttgaagtcggtttttcgggaaaggcggcgttttttttttatttaagggtcgagtgcgtttatttataaaaaatatagatttacgtatttgttttttttatttggtttaagagtttggttttcgttatattttgttcgttttattttttggagtttattttattcgtgattttttttttttatttaaatggttttcggtttttttttttttttcgtgttttttttagttttttattcgtgtttattttttcggcgttcgttttttttaatagtttttatttacgttatgtagtaggcgtttgttaagattatttttttttatttttattttttcgggtttcgttttttgggcgattgttggggtagtgagtgatagcggaggacggggggaggtagggatttagtttttacgtgttttttttttttttgtttgtagttacggggtttttaaaatagtttgagagttagagttatggggtatttgaagtttgatttttagttatataggtcgggttaaatggttttggtttagtggtaacgtttgtgtagtaatcgttattgtttgatgatttttaaattaggttttgtaaagttattttttatttttttaatagttttagggtaagttttgggattttttttttgagtttttttgtaggagttttttgtattatttatggagttttttttttttattagggttgatttttttttttttttttttttttttttttttttttttttttttttttttttttttttttttttttgtattttttttttttttttttttttagttttttttttgtttttgtttgttttttttttttcgttttttttttttttttttttttatttttttttgtttttttttttgtttttttgtttttcgtgcgtacgagtacgtaggcgcgttatacgttttttttttttggatggtttttagtatgtgggtgtggttgaggttaggttagagaagtggagtaggggtaggtggtattagcgttaagtttattgtttttaaaaaattgtgttagtatttatttttagttcgtattatattaatagttagagtattttataattttcgttttttattttttattatagtttttaagggttgagagtatttagtagtcgaattattagaggaggtttaggttggaaggaagtttttttaggaataggaaggtttggtatttagtgtttattttagtttgtttcgttgatttttggtttttttttttggttatataaagttttttttgtttttgtagttttcgggagtttattttttttttttttatttttttttttagaaattttatttttgttagttttttatatggttttgaggttatttttgtttttttttatatatagagataaaagttagagttttttatttttagattttttaaatttagttttttttttgttttaattagtattttgtgtatttattttttattttttgtttatttttatttttggattttttttttgtattttttgtttgttttattttagttgagttatttagttttttttgtattgtttgttttttttaatatatatttgaatttttggttgttttgtttgtggaggtgtttggttattattttttaagttgaggggagttgatttaacggggttaagtggtgtgttattaattttagacgtagtgtggtggtttaagaatgggttttggagttagattagatttttaatattagttttgtttattttttagttaggtgattttggataagtgatttgttaagtgaagggttttagtttttttttttttaaaatagataaggaaataatttaaatgtttaataataggggattttggttatgtaatagacgtagttattaataattatattttaagtttggcgtagtgatttacgtttgtaattttggtattttgggatgttaagacggttggattttttgagttcgggagttttaaattagtttgagtaatatggtgaaattttttttttataaaaaatataaaaaattagtaaggtgtgttggtgtgtatttgtagttttagttatttaggaggcggaggtgtgaggattatttgagttgggaggtagaaattgtagcgagtttagatggcgttattgtattttagttcggggcgatagacgagggttttgttttaaattaaataaaataaaattttatattaaaaaaataaaaataaaaaataattaatggtagatagtatagaggatttttacggtagcgaaaatatttttatgatattgtaatagtggatatttgtaagtatatatttgtttaaagatatagaatgtaaatattaagggtgaattaattttaatgtaaatcgtaggttttggttagtaatgatgtgttaatgtaggtttatcgattttaataaatttattattttgatagggatgttggtagttaggggagtcgtgattgtatgggggaaggaggtatatgggatttttcggatttatttgttagttttgttgtgaaattaaaattgtttttaaaaaataaaatttttatttaaaaaaattaaaatttatagaatgtataatattaaaaggaagtttttatgtaaattatggtttttggttgataatgtgttattgtatatttattattgtaagaaatttattattttggataggatgttgatagggaggttgtgtttgtgtgtggagaggggtataaaggatttttgatatttttagtttaattttgtagtgatgttaaaattgttttaaaaaataaagtgggtttggtgtagtaatttttgtaattttagtattttgggagttaggagaatcgtttgaattcgggaggcggaggttgtggtaagttgagattgagttattgtattttagtttgggttatagagcgagattttattttttaaatatatatatatatatgttttgttttgttttgttttgtttttgagacggagttttgttttgtcgtttaggttggagtgtagtggtttaattttagtttatcgtaagttttatttttcgggtttacgttatttttttgttttaggttttcgagtagttgggattataggcgttcgttattacgttcggttaattttttgtatttttagtagagatgggttttatcgtgttagttaggatggttttaattttttgatttcgtgatttattcgtttcggttttttaaagtgttgggattataggcgtgagttatcgcgtttgatcgtaaataaaatttttatttaaaaaaatttaggtcgagcgtagaggtttacgtttgtgattttagtattttgggaggtcgaggtgggtggattgtttgagtttaggagttggagattagattgggtaatacggtgaaattttatttttattaaaagtataaaaaattatttaggcgtagtggtgtacgtttgtggttttagttatttaagagggtaaggttggaggttgtagtaagtcgagattgtgttattgtttttagtttgggcgatagagtaagattttgttttaaaaaaataaataaatatataaataaaaataattttttgtattttgtatttattaaattttttttttttttttttgagatagagttttattttgttttttaggttggagtgtagtggtatggtttcggtttattgtaatttttgttttttaggtttaagcgatttttatgttttagtttttcgagtagttggaattataggcgtgtgttattatattagttaatttttgtattttttttagtatagatgggttttattatgttggttatggttggtttcgaatttttgattttaagtgatttatttatttcggttttttaaagtgttgggattgttaaaggcgtgagttattatttttagttttgtattttttaaattgttttattgagtatatattgtttttataattatgaaaaaatgttagtatttaaaaataagggttggttaggtacggtgggaggtcgtattttgggaggtcgaggcggatggattatttgaggttaggattttaagattagtttgattaacgtggtgaaattcgtttttattaaaaaatataaaaattagttggcgtggtggtagtttaggagttcgagataagtttgggtaatatggtgaaattttgtttttattaaaaatataaaaaattatttgagggtagtggtgtatgtatgtggttttagttattcgggagggtaaggttggaggttgtagtgagttaggattgtgttattgttttttagtttgggtgatagagtaagattttgttttaaaaaatatatatatataaataaaaataattttttgtattttgtattttttttttttttttttttgagatggagtttcgtttttgttgtttaggttggagtgtagtggcgcgattttggtttattataatttttattttttaggtttaagcgatttttttgataggtttaatttttttgtttttgtttttgtttttgagacggagtttcgttttgttgtttaggttagagtgtagtggtataattttggtttattgtaagtttcgttttttaggtttatattatttttttgttttagtttttttgtagttgggattataggtattcgttattatgtttagttaattttttgtatttttagtagaaacggggttttatcgtgttagttaggatggtttcgattttttga

SEQ ID NO: 257 - DNA, 6533 bp, Artificial Sequence
  chemically treated genomic DNA (Homo sapiens)
gtggttttttttgtgttttgttatgtttttttttattgataaaagtttgggttgtattttttttttaagtttttttttttttttttttattttgatagtttattggtttgaaaaaaaaaataggttggtaaatagtgatttaatatgtaaatagaggaatatgtttaaatattaatattattaaataatattagtaagatagtttggttaatgttagtttaaaggaaaatttaaattttagaatatttaattaaaatataagtggcgtaaaatgttttattttatttttttatgaggaaaggtaatatattttatattaataaaaataaaatgtattttaaatgaaatgttatttaaatttgttattttgtttatgattggattttaaagttaggagtaggattaaagagtatgtggtataggtaaaagaaaattttaaatttagcgttttgggaggtcgaggcgggtggattatttgaggttaggagtttaagattagtttggtcgatatggtaaaattttatttttattaaaaatataaaaattagttaggtatggtggcgtgtgtttgtaattttagttattcgggaggttgaggtaggagaatcgttggaatttgggtagaggttgtagtgagttttgattgcgttattgtattttagtttgggcgatagagtaaggttttgttttagaaaaaaagaaaattttaagttatagattaaaggaatgttgtagttaagtaaacgaggggagagattaaagttggggggagtggtaagtagtaaaggtttagagtggtagaagttttcggaggttgaatgtattttaagatgaaagataggaaaagtatcgatttaaaatgacggttatgttgtttaggttggttttaaaatttttgggttgaagtaatttttttgttttagtatttttaataggtggggttatagttgtatgttattataattagttaatttttaaaattttttttttgtagagacgaggttttgttatgttgtttaggttggttttaaaattttggttttaagtgatttttttattttagttttttaaagtgttgggattataggcgtgagttatagtacgtggtttagttttgaaagttttaatattgtagattttattaaatgttattttgaaaattaggtatagataattggttttttgagtataaaggaatttgtaagagttagttagggaatgaaagaagttttagagatagagtttagtatttatgagatttaaaattaggagtggtaagggttttttgtcgaagatttaaatttatttttttttgtaatagttacgaagttatttgtagttgaggatgagaaaatatagttaagtttttatttaatattattaatacggtaagtttttatttaatattattgatagggttttggaaattgggatttaaagggaaaagatatataatgaaattaatttatttttgttattaattttataataaaatgtgtttttatttaagataatagtttttaatttatttaggatattgaggatttatagtgttaagaaagtagaatttgtattggttttaaaggcgtttatttttttttattatttattttttattaaagttttaaagtagtagtttttagtttttttggcggtttttagaatttgatgaaagttatgaatttatttattagaatatatagatatatatatatatatatatatatatatatatatatatatatatatatatttaattttgtatatagtattaaaaggtttataaaaatttttaaatttatttatggattttttggaattgtattggttagtatggtaatatttggtaagattaattttattttaagtgtttattggttattattatagaaagttttattggatagtattgttttagatatggaggtagtttaagaattttggttttggtcgggtgtagtggtttacgtttgtaattttagtattttgggaggttaaggtgggcggattatttgaggttaggagtttaagagtagtttggttaatatggtaaaattttgtttttattaaaaatataaaaattagtcgggtgtggtgcgtggtgtttataattttagttattcgggaggttgaggtatgagaatcgtttgaatttgggaggcggaggttgtagtgagttgagattttattattgtattttagtcggggcgatagagcgagattttatttcgaaaaaataataaaaaatttttataaatttgttggtttgttaatattatttttagtttaatattagttagtttgttttttatatattggtagattataaagaattggaggaggattattattattattgattttgaataattttgaaagtttatttttttttaaaaaattaaattattattgttattttttgagatgtagttttgttgtcgtttaggttggagtgtagtggtataattttagtttattgtaatttttgttttttaggtttaagtgatttttttgttttagtttttttagtagttggaaatacgggcgtgcgttattatgttcggttaatttttttgtatttttagtagagacgaggttttatcgtgttaattaggagatgatttcgattttttgatttcgtgattcgtttattttggttttttaaagtgttgggattataggcgtgagttagcgtatttagtttaaatttatttatttttaagtatttataaatagtataaaattaaaaggattttagatagaaaatgattaattttttattttttttattttaaggtatgtgtagttttgtaaatatttttatgttatagattttgtaataataatttgagtggttttttttttttgagataaggtatatatttaggaatttgttgtgtatgcgtaatagttattatttatcggatttatattatgtgttaggtattgttttaagtattttgtgtagtttcgtttattttattttaatttagtgatatgaggtgaggtgcgtatagtagttttttaaaataaatgaggaaattgaagtttggggtttagtgagattatataagttgtttgagattatatagtaaatgttagagaaaagtggttttgaggttagagttttttgtaattggttatgagtttagaatttatgttttttgaaataggaatgtttaatgatcgtgttattgtattttagtttgggcgatagagtaagattttattttaaaaataaaagaataggaatgtttaaaattattagaatggttttagggagtaaataaggttttttaaattggattttgagtgttatggggtcgttggttttgtatttgttacgatagtttgtggatttgttattttttttggaataaaatttttaaaaaaggttaggcgtggtggtttacgtttgtaattttagtatagtgggaggttaaggcgggtagattattcgaggtgaggaatttgagattagtttggttaatatggtgaaatttcgtttttattaaaaatataaaaattagtcgggcgtggtggtgggcgtttgtaatttcggttatttaggaggttgaggtaggagaatcgtttgaattcgggagggggaggttttagtgagtcgagattgcgttattgtattttagtttgggtaataagagcgaaatttcgtttcggaaaaaaaaaaaaaagaaaaaaattaaaatattagtattttttttatttagttattataaatttttttaattttatattattttttattattatggtagttttatttttgacgatagattagttgtgtgatttaagtaaatgattttagtgttattatttgtaggaaggggttgttaatagtatttgttttatattaacgtgtttttaggatcgatttgtatataaacgtttaatatacggtaattgattgttatattttattttaggacgtttttatttgcggattttatggttcggaggatttgggtcgttttataattgggtagtttcgtttatcgatataaagtttataatcgcgtttaatagggaatcggttttgcggtttttttgttattcgtttttaattattatagtttacggcggagttggaggtagatttcgtttttgtagggttgggtaagagattgaaatttggagaatgaattgtaggcgttgtatatttcgggtagatttaaaattcggtttaaaatcggaagtaggtgtcgcgaatttagattcgagcgtttttttgggacgtttagtcgtagaagcgagtttaaagtttagtagggtttttcgcgggattcggggttttagaatcgtcgggtttttgggcgttcgtttagggcgtacgcgtagtcgcgaggtcgcgtcgcggattgtattttttagtaggtttcgcgtagtaggttacgcggcgttattgattgggcgggcggttagttttttggttttttcgatatgtcgaggagtttttggttttcggagtcgacgaggtcgtaggggttaatgggattatttttagttagtttagagtagtcgaagcgggtggggtttggtttgggaaaggatttattcggggaagttgattaataatttagattttcgggttttatttcgatattgacgtattggagagcgcgtggttttgggatttgcgtttttttaagcgtttcggagtaattttaatttaggttgttcgttagttataacgattttaggtttgtttttttcgtttggatttagttgttttgtttttagttatttttagaattttagggcgcgtttcgtggtttcgtttttcgtttttaattggtttttcgtttatttagttttcgtaggttaattttttttttttattggtaggcggtgagtgtgtggagaaatttgatttaatgggcgttggagttcgtaaaacgtgattcggaaattggttacgagtaggcgtcgtgggtttgtggacgtttaatttgcgcgttgagattttcggcgtgggagtagaggtttgagttttgcgtgggttttttatatagggtgagaagcgtggcgttcggtttttgtttcggggaagttttggcgtagatgggttacggggtcggcgtggcggcgtttgggatcgattgaggtttaggcgtcggagtcggtcgcgtttgggttggagcggggtttttcggtttggattgggagttttcggtttcgggtttttgttggcgtcgtttaattttatatgggtttagggcgttttcgtaggcgggtacggttggtttcgggttaaggcgttttggagatttgacgatggcgtcgggttcgggtttttaggaacgggaagggtttttgatagtgaagttggaggaggattgcgtttggagttaggagttgtttttatttgatttaggatcgagtttcgaggttttttatttgcgttttagacggtttcgtttttaagaggtagttggttttcgggaagtttttagtcggttttaagagttttgttatgggtggtttcggtttgagatgcgtacgaaggagtagattttggagttgttggtgttagagtagtttttgattattttgttttaggagatttagagtagggtgtaggagttgtattcggagagcggcgaagaagcggtgatttttgtggaggatatgtagagagagtttgggagattgagataataggtgagagagagagagagttgttttatttgtggtttgtttagttttgagtattgggatattgcgttttcggtcgaatttaagtaaattgttttgagtagattttacgtggggaagaggatttgtgatttaatttggaatatttattttttagatttttttttaaatgaacgaaagtagtgaagagtgttttgtttttacgcggaggcggtgtttttgtaatagttagtgttagttatggagttagatcgttagcgtttaaatttttaatttgttagtattagttttgttattttggtaagttatttgatttttttcggtttgtttttttattcgtaaaatgaggatattaatatattttttagggtttagagggagagtagtatgtaaagttgtgaatattattagtttatgagtgtttagtatttgttatttgttgttatgttagggtttacggtttggttttttttgtaaagttgggttttcgttaattgtgaattttgaaagataatttggtatcgaggttttgaggttattggtttttagggttattttaatttagtttattttatagtgaggaatagaagtatttagaaaaggtggggagagtaaaagggagtgaggtgtattttaagagttgtgtggggaaggtgtgttttgggagtgggttttttttttaatttttttttttgtatatgggattaaaaaagtttttagtgtaaattatttttttgttatttgggtttaaagggatcgtttgaggttttttgttgaaggtttgtttttagtattttatattaattttttttttttttgggttttgttgtgatgatgagtgatgtgggttggtttttagg

SEQ ID NO: 258 - DNA, 6533 bp, Artificial Sequence
  chemically treated genomic DNA (Homo sapiens)
tttgggaattaatttatattatttattattataatagggtttaagaggaagggaaattagtataggatattgagagtaaatttttaatagagaattttaggcgatttttttgggtttaggtaatagaaaaatggtttatattaaaggtttttttgattttatgtgtagggggaggggttagggaaagggtttatttttagagtatattttttttatatagtttttaagatatattttatttttttttgttttttttattttttttaggtgtttttattttttattataggataggttaaattggggtagttttggggattaatgattttagggtttcggtgttaaattattttttaaagtttataattaacggaggtttagttttgtagagaagattagatcgtggattttaatataataataggtaataagtattaagtatttataagttagtagtgtttataattttatatgttgttttttttttaagttttagaaagtatgttaatatttttattttacgaataggaaaataggtcgaaagagattaagtaatttgttaaagtaataaagttagtattagtagattgaggatttgaacgttggcgatttaattttatggttaatattaattgttgtagggatatcgttttcgcgtggaaatagggtattttttattgttttcgtttatttgggggaaaatttggaggatgagtgttttaggttaaattataagtttttttttttacgtaaggtttatttagggtaatttatttgaattcgatcgggggcgtaatgttttagtgtttagggttaaataaattatagataaaatagtttttttttttttttatttgttgttttagttttttaagttttttttgtatattttttataagggttatcgttttttcgtcgtttttcggatgtagtttttgtattttgttttggattttttggggtaggatggttaggaattgttttaatattagtagttttaagatttgttttttcgtgcgtattttaggtcgaagttatttatggtaaagtttttggagtcggttgagggtttttcggggattagttgttttttggaagcggaatcgtttgaagcgtaagtgggaggtttcggggttcggttttgggttaggtgggggtagtttttggttttaggcgtagtttttttttagttttattattaggagtttttttcgtttttgggagttcgggttcgacgttatcgttaggtttttagagcgttttagttcgaaattagtcgtgttcgtttacgaaggcgttttgaatttatgtaaggttggacggcgttagtaggagttcggggtcgggggtttttagtttaggtcgaggagtttcgttttagtttaggcgcggtcggtttcggcgtttaggttttagtcggttttaggcgtcgttacgtcggtttcgtggtttatttgcgttaggattttttcgaggtaggaatcgagcgttacgttttttattttatatagaggatttacgtaagatttagatttttgtttttacgtcggaaattttagcgcgtaagttaggcgtttataagtttacggcgtttgttcgtgattaattttcgggttacgttttgcgaattttagcgtttattaggttaggtttttttatatatttatcgtttattaatgagaagggaagattggtttacggggattggatgagcgagggattaattggagacgagaggcggggttacggggcgcgttttgaaattttgggagtgattgggggtagggtagttggatttaagcgaagaaaataagtttgaggtcgttgtgattggcgggtaatttgggttagaattatttcggagcgtttgggaaaacgtagattttagggttacgcgttttttagtgcgttagtgtcggggtgagattcggaaatttgaattgttaattagttttttcggatgaatttttttttaagttaggttttattcgtttcggttattttgggttggttgaagatggttttattggtttttgcggtttcgtcggtttcggaagttaggggtttttcggtatgtcggggaggttagggagttagtcgttcgtttagttagtggcgtcgcgtggtttgttgcgcggggtttgttgggagatgtagttcgcggcgcggtttcgcgattgcgcgtgcgttttgggcgagcgtttaagagttcggcggttttgaaatttcgagtttcgcggagaattttgttgggttttgggttcgtttttgcggttggacgttttagaggagcgttcgggtttgggttcgcggtatttgttttcgattttagatcgaattttaaatttgttcgagatgtgtagcgtttgtagtttattttttaagttttagttttttatttagttttgtaagggcgggatttgtttttagtttcgtcgtggattgtgatagttgggggcgagtggtaggagggtcgtagggtcgattttttattgggcgcggttgtgggttttgtgtcggtgagcggggttgtttagttgtgaggcggtttaggtttttcgggttatgagattcgtaaatggaagcgttttgggatagaatgtgataattagttatcgtgtattgagcgtttatatgtagatcgattttgaaaatacgttagtatgaagtagatgttattagtagtttttttttataggtggtggtattgaagttatttatttgggttatatagttagtttgtcgttaaaggtgaggttattatgatagtagagggtaatatgggattaaaggggtttgtgatgattaagtgaaaagagtattgatattttagtttttttttttttttttttttttcgagacggagtttcgtttttgttgtttaggttggagtgtaatggcgtagtttcggtttattgaaatttttttttttcgggtttaagcgatttttttgttttagttttttgagtagtcgggattataagcgtttattattacgttcggttaatttttgtatttttagtagagacggggttttattatgttggttaggttggttttaaattttttatttcgagtgatttgttcgttttagttttttattgtgttgggattataggcgtgagttattacgtttggttttttttaaaaattttattttagggaagatgatagatttataggttgtcgtggtagatgtagagttagcgattttatagtatttaaggtttagtttggaaagttttgtttgttttttaggattattttggtggttttaggtatttttgtttttttgtttttgagatagggttttgttttgtcgtttaggttgaagtgtaatggtacgattattggatatttttattttaagagatatagattttagatttataattaattgtagaagattttagttttaaaattatttttttttgatatttattatgtaattttaggtaatttatgtaattttattaaattttaaattttagtttttttatttgttttgagggattattatacgtattttattttatattattgggttaggatgaaatgagcggagttatataggatgtttagaatagtatttggtatatagtatgaattcgataaatagtagttgttacgtatgtatagtaagtttttgaatgtgtgttttattttaaaaaagaaaagttatttagattattattgtagaatttgtggtatgggaatgtttgtagaattatatatattttgagatagggagaatgagggattaattattttttatttaaggtttttttgattttatgttatttataggtatttaaaagtagatgaatttaggttaggtgcgttggtttacgtttgtaattttagtattttgggaagttaagataggcggattacgaggttaggagatcgagattattttttggttaatacggtgaaatttcgtttttattaaaaatataaaaaaattagtcgggtatggtggcgtacgttcgtatttttagttattggggaggttaaggtaggagaattatttgaatttgggaggtagaggttgtagtgaattgagattgtgttattgtattttagtttgggcgatagtaagattgtattttaaaaaatagtaataataatttaattttttaaaaaaagatgaatttttagggttatttaaaattagtggtggtagtagtttttttttaattttttgtgatttgttagtatgtggaaaatagattagttggtattagattaggagtggtgttaataggttagtagatttgtaggggttttttgttgttttttcgagatggagtttcgttttatcgtttcggttggagtgtagtggtgggattttagtttattgtaattttcgttttttaggtttaagcgatttttatgttttagtttttcgagtagttgggattataggtattacgtattatattcggttaatttttgtatttttagtagagatagagttttgttatgttggttaggttgtttttgaatttttgattttaggtgattcgtttattttggttttttaaagtgttgggattataggcgtgagttattgtattcggttagggttagggtttttaagttgtttttatgtttggagtagtgttatttaatagaattttttgtgatggtagttaatgggtatttaaaatggagttagttttgttaagtattattatattggttaatgtagttttagaggatttatggatgggtttggagatttttgtaaattttttgatattgtatgtaaaattggatgtgtgtgtgtgtgtgtgtgtgtgtgtgtgtgtgtgtgtgtgtgtgtatttgtatgttttagtaagtgggtttatagtttttattaagttttaaaaatcgttaaaaagattaagaattgttattttagggttttggtgaaaagtaagtagtgaagagaagtaagcgtttttgaaattagtatagattttatttttttaatattgtaagtttttaatgttttagataggttggaaattgttattttaagtgaaagtatattttgttataaggttgatgataaaaataaattagttttattatatgttttttttttttaagttttagtttttaagattttattaatgatgttaagtgaggatttatcgtattagtgatgttaagtgaggatttaattgtgtttttttatttttagttgtaggtgatttcgtgattgttgtagagaaaaataaatttgaattttcgataaagaatttttattatttttggttttaggttttatgggtattagattttgtttttgggattttttttattttttaattagtttttatagatttttttgtatttaaggggttagttatttgtgtttggtttttaaagtgatatttggtgaaatttatagtgttaagatttttaagattaggttacgtattgtggtttacgtttgtaattttagtattttgggaggttgaggtggaagaattatttgaggttaggattttgagattagtttgggtaatatggtaagatttcgtttttatagaaaaaaaattttaaaaattaattggttgtggtgatatgtaattgtagttttatttattagggatgttgaggtaggaggattgttttagtttaggagttttgagattagtttgggtaatatagtcgttattttaaatcgatgttttttttgttttttattttagggtatatttagttttcgggagtttttgttattttaagtttttgttatttgttattttttttagttttggttttttttttcgtttatttgattatagtatttttttgatttatgatttagggttttttttttttttgagatagagttttgttttgtcgtttaggttggagtatagtggcgtagttaaggtttattgtagtttttgtttaagttttagcgatttttttgttttagtttttcgggtagttgggattataggtatacgttattatgtttggttaatttttgtatttttagtagagatggagttttgttatgtcggttaggttggttttgaatttttgattttaggtgatttattcgtttcggttttttaaagcgttggatttagggtttttttttatttgtattatatgttttttgattttatttttagttttgaaatttaattataaataaaatagtaaatttaaatggtattttatttgaaatgtattttatttttattaatatggaatatattatttttttttatgaaaagataaaatgagatattttacgttatttatattttgattaaatgttttggagtttaaatttttttttggattaatattaattaaattgttttattaatattgtttgataatgttaatatttagatatatttttttatttgtatattagattattatttattaatttatttttttttttagattagtaaattgttaagatgaggagggagaggaaagaatttggaaagagggtgtaatttaaatttttgttagtgaggggaggtatggtaggatataggggagattat

SEQ ID NO: 259 - DNA, 7047 bp, Artificial Sequence
  chemically treated genomic DNA (Homo sapiens)
  unsure (182)
ttttttttataaaggggggggaagaaaaaaaaaatttttttttaaaaaaaattaaattgtgggggggagagggggggaaaaaaaaaaattttttttttaaaaaagtgttcggggaaaaaaaaaaaaaaaaaaaaattttttggggagaggggaaaaaaaaaatttaaaataaaaaaaaaagnttgtttgtattttttggtttgattaaatttttggatgttattaagaaggtttgtattatttaagatttattgtgatttatttattgttacgtatgtttatatagaagattatttaaataggtttagtgtgagtaataaggttgtttatttatttgggtgtaagtgggttgagtttaaaaagagagttagcgaagggagataggagaggggtaattttataggatttgggtaggtagtggaaagttatagttgaaggtggttatttgttgttagtagggggaggaggttataacgtgtatggtggggagattatgagatttattgttttggagaaaaatgttataaggtcgattgattagttagggtagggtaggaataagttataatggtggaatgtcgtaagtttggttaattagttaaggttgaaattggttgttttattttttttgtggtttttcggttgttttagattttttggtttttgtaggtcgtttggatgtatacgtgtaggttataggggttataatggtttagtttcggtttagaggtttgatatttatttgtttgtttatttttagagatagggttttgttttgttatataggttggagagtagtggtggaattataatttattgtagtttgtaatttttagatttaagtgatttttttgagtcgtttgaggtatagtatatttagttaattttttgatttttttttttttttgtagggagggtttttttttgttgtttaggttggttttaaatttttgggtttaagtaatttttttgtgttgttagttatttagagtgttgggattataggtgtgagttatatgtttggtttaatgtgtatagtatgtatttaaagatagtgttattgttgtggaaaatttgaatagatagtatgatttagaatgttaggtgtggagttgggcggataagagtttgttgatgaggataatttaaaagagtattggatttggaattagaagatttatttttgatttttggtttttttttaatggttatgtgatgttattaagttagtttttaaagttttagttttttgttagttaaatgttgatatgatatttattttatagggttgttgtgagggttaagtgaaaggatttttgtgaaagtattttttgaaattatttagttgttaataaagttggataaaagaggttatggtaaaagtttagaatatgggattatgtaagtttgtgtattaagataatattagaatgagggggattttaggaatttaaaagatatttaattttataagaggaagtatggtgaatagttaattggaatttagtgttttaagaataattttgttaaatttatttttaaaaatatttgagggagttattagattatatatttagtttatgtatatggaaaaaaatgttatggattagttattaatagtgatgttaaggaaaataatttattttttagtttttgaatttgaaatttaatagatggagagtgttaaaatggaagggtagtggtattttgttttttttatttagagggaaaaaaatttttgattcgtagttgagttgatgatttttgttatagttattgtgaattttaattaatattttattattgttgttaaatgatagtttgttattaatgaaataatattttgttttagtattaaatttattgggatataaattttttatatggagttaagttttttattgattaagttagtgtagaatttatttgtgggtagttagtgtttattattttttgtgaattattttgtgtttttgagtatatttgtgggtttaatttagtttatatttttaagttggtaatttttatgttgtaatttttaaagttttgtttttgtagttggattatgaataatatttgaatatgaagattgtgttttttaataatgttaaagtggtgtgttgattattataaatgttattaatttaattttatagttttttgggggttggttttttattagagtgaaaggtagttaagagtgaaaattggaaggggtttaaggtttaaagttttaagatttggatgtggtttaggttttgttatttgttttagaaaaaatttttttagtttttggagttttgaattttttatttgttaaataggaggaagaatatttattttataaagtttttatgagataatgaatataaaaatgttttatttaggttgttgaattattttagtttatataataattataaaggatatatgtattttaataatggagaatgttgtgatttatttttttatcgagtaataaaatgttatattgtttagattgagatagtttatataatgtgttattttttgtgatgtaataagttgaaaaatgtttaatttgaatttaattaagttttttggattttattgttaggttataggaaatataggaggtagaggaataaataaaagatattacgagaaatagatatatttagaacgtggaatattgtataagaaagttgttttggattttttaaaatattattatgatgaaaaagagaggggagtgaaaattgtttaagttgttttgagtttgttgtgagtttattatattattttttgtttttgtgtatgtatgaaaatttcgatatgaaaggtataaaatatggatgaggaggtttgtttttaaaagataatattagagagtcgttaggtattaagaattagaaatagatttatataaatggttaattgatttttgataggggtaaaagtaatttaatggaggagggatcgtttttttagtaaatattgttggagtaattggatatttataggtagtaaattaataattttaggatttaggattgagttaagaaggtttagatgatttaaaagtatgttttttagaaggaaaaaaaatgttaaattggattttattaaaattaagataatttattttgtaagagatttttttataaagatgatattataggttgggaaaaaatatttgtaaattatatttaataagggatttgtatgtaaattatataaagaattttttaaatttaatagtaataagtaaatataattagaaaataagtaaaagatagatattttattgaagtatagatagtaaataagtaaatgaaaagatgtttaatattattaggtatgagggaaatgtagagtaaaatcgtgagatattatttattagaatagtttaattttttttttttaatggtggtaattgttggtaaggatgaagagaaataggattttatatattgttgggaatgtaaaatggtatagttattttggaatataatttggtagttttttgtaaaattatatatgtatatgttatgttttaggaattgtatttttgagtatttattttagagaaatgaaaatttgcgtttatataaaaatttgtatacgaatgtttatagtagttttatttgtaatggtcgaaatttgtaggtaatttatatatttttttttaggtggttaaaataaattgtggtttatgtattattatggaatatttgttattttgtaataaaattgatttattgatatttataataatttaaataaattttaagggaattaatgttgagtgaaaataattataaaaggttatattttgtatgaaaatatttatataatatttttaaaatgataaaattatagagatgaaaaatggattaatggttgttaaaggttagggatggtgggaggaaaaatggggagagggttggatggaattattaaaaggtagtattagaaaggtttttgtggtgatggaatatttgtgtattttgattgtagtggtggttatataaatttataggtgttatatttatatatatatattgtattaatgttgatttttttttttattttatgtaagatgtaattatgaggggaaagtgggtgaagggtgttatttttgtaattttttgtgattttattattttaaaataaaaagtaaaaattaataatggtaacgaaaatttaaaattaaagagttgtaattaattaaagtgtgtgaaattgatttgaaaaaaagttataaaatatatgttttaggatagttgggaaatttgaatatgattggttattagatggtattagggaatttttgttgatttttttatttgtgacggtggtggtagtttgaagaatatttttaattttaagggatgtatgttgaagtatttggaatgaagtgttttgatgtttataatttttaaaaaaatgattttaaatatgtattgagagattaggtaaatatagtaaaatgtttattgttgagtttatatggaaaatacgggtatttaatgtgttatatttttaatttttttgtattttgatatttttaaaataaaatatttgaggggaaattattagggttttttatagattaatgttgtgtagttttaggtttttgggtgcgcgtttcgtttgagtgttttatttttgtttgggatgcgtttttttttgaggtttatttagagtttttaatagtataatttttttaagcgtttttgttttatttttggtttggggcgatattggatatttatcgagaggaaagtattttcgaggtttttagagaggtcggtttggcgatttggggagtcggaagtttatttcgaggtattttttgttcggttattgttttcgtgtcggtagaagttgaagtatcggttagttagttttttgttgtagagttagtgaatttaggtcgggttttttagttgcgtatagtgagtggggtcggagggggtgggtacgaacgtcgagggagaaaaaggggtttttttaggggttatggttttaggagcggtttttgcgtttttttttcggggatattagttttgtttgtcggggtgcggggggtagtgagttttttatcgtttcggaatttcggttgttgtttatttggggtttggttcgggagaggatgtatacggatcggttaaggggttagataggttttagggatagggtcgcgaggagtttatacgtggaaagaatggattgttacgtttggaaatagagaaaggacgttgaaagggagtttttgatagagggttttgtgtcgtttgggatcggaggttcgttagaatttgattagaagtttgatgagagtatttattgtaggtagttttatatataaggtggaattagttttaaggatttttatattagattgaattcggatagtgatggaaagaatagttttttagaattaaggtttgttataggaatgaaagtattgtattatttaataaatttagtgtatatagtaagtggttagtaagttgatatggggaaaagagtatgattattttaatagtagtaataggggattgaataagatttcgtatttttttttaataaaatatttaaagggggttagaaagaaaaattttaatttttttataagtaattaaattagtaaggttattttgtttataggttaaaaataaaaattttgttggtttagttgtgataaagggttattgttaattagtgggggtgtgaattggtatggtgtttttggaaagtaatttgatagtatatattaattagtaaatttttgaattagtaattttttgattattttaaaggaataatttagtaaaaaaaaaatatttataaagaaaaatttttaaatattaataaaatggaaatataaatttttattaaataaatggtttataaatagaatatgattaagtaaatgataatatagttataatttagaatattatgttagaatgaggtagttttatatgtgttgtattgaaagattgttaagattattgtgaaatacggaaattgagttaaaaaataatgtaggttgttgaatagtatataattgtgatgatttaaagtatgtttttgaaaaataagtaatatgtgtgaaggtgaatatataagtatgtaaatgtagagaaaatgggttaggatttttatttaaattgataagtattttgtgtgtgtgtgtgtgtgtgtgtgtagtgtgtgtaggttatatatttaattttatatatttttgtattatttgatttttttttaatgagagtgaagatttattaatattataggttattgtgtagtatttaaaataagtatgaagaatggtaatatgaaagtaatttttttttaaattttaagtgtaatattttattttataggatatttggaagttatggaaaatgtaaaaattaaataaaaaaaatgaaaagaattttaaaattatttgtaattatattatttagagttaattatttattgttaatacgttggtataaagatttttagttttttttttgggatttttttgtttatattattttgtatttttggtaataaaaaatttttttgttgtaaaatttttttttaaaaaatgttatgatgataattgtgaaaatatgtatttttaaagttaaaaataagaatttgtaaaattataattattagtagtatggttggagatttttttttgaaagaaatattttaaattttaaaatgtatagtggttatttttttggaggtagatcgagatgattttttttaattatttgttgtttttaagtttttataataaaagtaagttaatttttaattaggaaaaaattaataaatattatataaagttgtttgtaatgtggttattatgggaagatattatatatttatagtttaatttttttattttatgagggaggaatagaggattttatgttttatattggtttttggttaggcgttggtgaaatttgtcggtgtggtattcggtaaatttgttaagtggtatttagtaaatttttttttggtgttaatagtgttttttgattttttagt

SEQ ID NO: 260 - DNA, 7047 bp, Artificial Sequence
  chemically treated genomic DNA (Homo sapiens)
  unsure (6866)
attgagaaattagaaaatattgttagtattaaggagagatttgttggatgttatttagtaaatttgtcggatgttatatcggtaaattttattagcgtttggttaggggttaatgtaggatatggaattttttattttttttttataggatgaaggggttggattataaatatgtaatatttttttataataattatattgtaaatagttttatataatgtttattgatttttttttgattaaaagttaatttatttttattgtaaaaatttaaaagtagtaaatgattaagaaaaattatttcggtttatttttaaagagataattattatatattttaagatttaagatattttttttaaaggaaaatttttaattatattattaataattatgattttataaatttttgtttttgattttggggatatatatttttataattattattatagtattttttaaaaaaggattttataataaaaagattttttattgttaaggatataaaataatgtgaataaaaggattttaagaaaaagattgggagtttttatattaacgtgttagtagtgggtagttaattttggatggtgtaattataggtagttttaaggttttttttattttttttgtttgatttttatattttttatagtttttaaatgttttgtgagataaaatattatatttaagatttaaaaaaagattatttttatgttgttattttttatgtttattttaaatgttatataataatttatggtgttgataaatttttatttttattgaaaaaggattaagtaatatagaaatatatagaattaaatatataatttatatatattatatatatatatatatatatatataaagtatttattagtttagatgggagttttaatttattttttttgtatttatatatttatatgtttatttttatatatattgtttattttttaaaaatatattttagattattatagttatatattgtttagtaatttgtattgttttttaatttaattttcgtattttataatagttttaataattttttaatataatatatatagaattattttattttggtatagtattttaaattgtggttatattattatttatttaattatattttatttatgaattatttatttagtaaaagtttatatttttattttattaatatttaaaagtttttttttgtaaatattttttttttgttgaattatttttttagaataattagagaattattggtttaaggatttgttggttgatatgtattgttaaattgttttttaaaagtattatgttaatttatatttttattaattgatagtaattttttattatagttaagttagtagggtttttgtttttaatttgtgagtaaaataattttattagtttgattgtttatgaagagattgaaatttttttttttaattttttttgaatgttttattggaaaagggtgcgaaattttatttaattttttgttgttgttattgaagtgattatatttttttttttatgttaatttattggttatttattgtatatattgaatttattaagtaatgtaatatttttatttttgtgataaattttaattttggaggattattttttttattattattcgaatttaatttggtatgaaggtttttaagattagttttattttgtgtataagattgtttatagtgagtatttttattagatttttgattagattttgacggattttcggttttagacggtatagggttttttattaaaggtttttttttaacgttttttttttatttttaaacgtggtaatttattttttttacgtataggtttttcgcggttttgtttttgggatttatttggttttttggtcggttcgtgtgtattttttttcggattaggttttaggtgggtagtagtcgggatttcgaggcggtggggaatttattgtttttcgtatttcgatagataaggttggtgttttcggggaaaggacgtaggggtcgtttttagggttatggtttttgggagagtttttttttttttttcgacgttcgtgtttatttttttcgattttatttattgtgcgtagttgagaagttcgatttgagtttattggttttgtagtaggaggttggttgatcggtattttagtttttatcggtacgagaataatgatcggataggaagtgtttcgggatgggttttcggttttttaagtcgttaagtcggtttttttaggaatttcggaggtgtttttttttcgatgggtgtttaatgtcgttttagattagggatggggtagaagcgtttaggaggattgtgttgttggaagttttaagtgagttttagggaggggcgtattttaagtagggatgagatatttaggcgaggcgcgtatttaagagtttgaagttatatagtattaatttgtagaaagttttgataatttttttttaaatgttttattttgaaaatattagagtatagaagagttgaaagtatggtatattgaatattcgtattttttatgtggatttaataatgaatattttgttatgtttgtttgattttttaatatatatttaaaattatttttttgaaagttgtaaatattagaatattttattttaaatattttaatatgtattttttaagattaagaatattttttaaattattattatcgttataggtaagaaaattaataaaaattttttaatattatttaataattagttatatttaaattttttaattgttttaaaatatgtattttataatttttttttaaattagttttatatattttagttggttatagttttttagttttgggttttcgttgttattgttggtttttattttttattttgaaatgatagaattataggaagttgtaaagatagtattttttatttattttttttttatggttatattttatataaaatgaaaaaggaaattaatattggtatagtatgtgtgtataggtatagtatttatagatttgtgtaattattattgtaattaagatatataagtgttttattattataaagatttttttggtgttattttttaatagttttatttaattttttttttatttttttttttattatttttaatttttggtaattattaatttattttttatttttatagttttattattttgagaatgttatatgaatatttttatatagaatatggttttttgtgattatttttatttagtattaatttttttgaaatttatttgagttgttatggatattaataagttaattttattgtagagtaataagtattttatggtaatatataaattataatttgttttaattatttaaggaaggatatatgggttgtttataggtttcgattattataaataaagttgttatgaatattcgtatataggtttttgtgtgaacgtaagtttttatttttttgggataaatgtttagaagtgtaatttttgaagtatgatatatatatgtgtggttttataagaaattgttaaattatattttagagtggttgtattattttatatttttagtaatgtatgagattttgtttttttttatttttgttagtagttattattattaaaaaaaaaaagttaagttattttgataggtgatattttacgattttattttgtattttttttatgtttaatgatgttgaatatttttttatttgtttatttgttatttatattttagtgaaatgtttgttttttgtttattttttaattgtatttatttattattgttaaatttggaaagttttttatgtagtttatatataaattttttgttggatatgatttgtaaatatttttttttaatttgtaatattatttttgtaaaaaggttttttatagggtaaattattttaattttgatgaagtttaatttaatattttttttttttttaaggagtatgtttttgagttatttgagtttttttagtttagttttaggttttgaagttgttggtttattgtttatggatatttaattattttaatagtatttgttgaaaaggcgattttttttttattgaattgtttttgtttttgttaaaaattaattggttatttatgtgagtttatttttggtttttagtatttaacggttttttagtattattttttaaaaataagtttttttatttatgttttatattttttatatcgaaatttttatatatatataaaagtagagaatggtataataaatttatagtagatttaagatagtttgaataatttttattttttttttttttttattataataatattttgaagaatttagggtagtttttttatgtaatattttacgttttggatgtgtttgtttttcgtggtgttttttatttgtttttttgttttttgtattttttgtaatttggtaatgaggtttaagaagtttgattaaatttaggttgaatattttttagtttattatattatagaaggtggtatattatgtgggttgttttaatttaagtaatgtgatattttgttattcggtgaagaggtaaattatagtattttttattgttaaagtatatatgttttttgtaattattatataagttgggatgatttaataatttggatgaaatatttttatatttattattttataagaattttgtgaggtagatatttttttttttgtttaatagatgaggaatttaaggttttaagaattgaagagattttttttgaggtagatggtaaaatttgaattatatttaggttttaagattttaagttttaggttttttttagtttttatttttggttattttttattttaatgaggaattagtttttaagaaattgtggggttgaattaataatatttatgataattaatatattattttgatattattaaaaaatataatttttatatttaggtattatttatagtttagttatagaaatagaattttgagaattataatataaaaattattaatttaagaatatagattgagttaaatttataaatgtatttaagggtatagaatggtttatagggggtaatgggtattgattgtttataagtggattttgtattggtttaattagtgaagagtttggttttatgtgaaaaatttatgttttagtaaatttagtgttgggatagaatgttgttttattagtaataggttattatttgatagtaatgatgaaatattgattagaatttataatgattgtggtagggattattagtttaattgcgggttaaggatttttttttttttgaatagggaaagtagggtattattgtttttttattttgatattttttatttgttaagttttaaatttaaaagttgggaaataaattgttttttttggtattattgttaatggttgatttataatatttttttttatatatataaattagatatataatttagtaatttttttagatatttttaaaggtaaatttaataaaattatttttagaatattaaattttagttagttatttattatatttttttttatgaaattgagtattttttaggtttttggaattttttttattttaatattgttttaatatataaatttatatgattttatgttttaaatttttattataattttttttatttaattttattgataattgaatgattttaaaaagtatttttataaagatttttttatttaatttttataataattttgtgaggtaggtattatgttaatatttgattgataggaaattaaagttttagaggttgatttaataatattatatggttattaagggaaagttaggaattaaaggtaggttttttgattttaaatttagtgtttttttaggttgtttttattagtagatttttgttcgtttaattttatatttgatattttggattatattgtttgtttaggttttttatagtagtgatattatttttaaatgtatattatatatattagattaggtatgtggtttatatttgtgattttagtattttgggtggttgataatataagaggattgtttgagtttaggagtttgaggttagtttgggtaatagaggaagattttttttataaaaaaaaaaaaaaattaaaaaattagttggatgtgttgtattttaagcgatttaggaggattatttgagtttaggagttgtagattgtagtaagttatgattttattattattttttagtttgtgtgatagagtaagattttgtttttaaaaataaataaataaataaatgttaggtttttgagtcggagttaagttattgtaatttttgtgatttgtacgtatatatttagacggtttgtaggagttaagaagtttggagtagtcgagaaattataaaagaaatgaaatagttagttttagttttaattgattaattaaatttacgatattttattattatgatttgtttttgttttattttaattgattaatcgattttatgatatttttttttaggataatggattttatgatttttttattatgtacgttgtgattttttttttttgttgataatagatgattatttttaattgtaattttttattgtttatttaagttttgtaaagttgttttttttttattttttttcgttgattttttttttggatttagtttatttgtatttaagtgaataaatagttttgttgtttatattaagtttgtttaggtggttttttatatggatatacgtgataataaataaattataatgagttttaggtgatgtagatttttttgatggtatttagaagtttgattagattaagagatgtaaatagntttttttttttgttttgggtttttttttttttttttttttaaggagttttttttttttttttttttttttcgggtatttttttaaaaaaaaaattttttttttttttttttttttttttttataatttggttttttttgagaaaaaattttttttttttttttttttttttataaaaaaaa

SEQ ID NO: 261 - DNA, 4057 bp, Artificial Sequence
  chemically treated genomic DNA (Homo sapiens)
gattatattattgtattttagtttgggcgatatagtaagatttagttttaaaaaaaaaaaaaaaaaaaaaaaaaaaaaaaaaaaatatatatatggatgtttattttttattttgttttatatttggtattttttgtgtattttttaatttaagtatatagtagtaagtgttttatatttttgggtagttatatagaattttattgtggtttattgtggatatattattgaaaattttgtatgtaggttatttagtataaggaggaatataattgttgaagaagtatttaaaaattgaattatttgaataaagtgtgggatatttgttgttttgatggattttattatattgtttttttatttatgtttattagtaatatataggaatatttgggtttttgtagttagggtgtggaaatggtagatgagtttagttttaaggtgtattttttttattaggaggagatggagtgtattttatgggatataagtattagttatattttttgttttgtttatattttttgtttatgtgtttatgaggttattgattttttttattgatttattgtagttttttatttaggaggttaattagttttttgtttgtggagagttttttggtttgttatttgtttttttttaattttttttgttttttggttatttgttttttgattttgatgtggtttttgttgattttttttgatgtattttagtttatttgatttttttttggcgatttatggatttttttttattattaaaagtttttattgtttttttagtttttttgatttaattttttttaggttttcgttttttttaggttttgatttttagttggagttgttggtgtttttttttttatttagcgtttgacgttggagtgtttatagtgtggttgggatttattttttttttttgtagatatttatttttgtgttgattatttgtaggttcgggttttgtgtgttatgtgtatgttttagagtttttgtttacgtttttttatagtttttatgaagtttgtgttttttagatgttttatagatattataagtaaggtatatttaaattttagattattatttaggagtttgtattttttttttgttggttttatttttagttttcgagatttatttatttttttgtatttgttgagattattattttttatttagataatgtttttacgtttgttttatagtttttttaaaaacgattttttttaatttaaattagatttagaaagtttttttatatagtttagtttttttttttgtgttgggttttgttttattattattttattagggaagtttgtatagatagaatttttatttttgtatttgtcgttttcgtttgtttttttggttagttttaggtttttgtagtttatattgtgtttttagggatgaagtgggtttcggtacggtgggtattttgttatgaatgaatggtttttttgtgtatgtagggttcgcgttgtagttaggtagtattttcgtaggtttaggtagtgtaagtttttatttttacgttttttgggatttcggtatggttggtttttttggttagatttaattattttttcgcgaaggtggttttgcgtatgcgtttttgttttttagcgatttgaggagtgaataggattttacggacgaggatttttgtcggggtgtgggttttgttttgattattattcgttggcgtttttttaggggtcggagtcggggtcgttttagtattgggggcggggtggttaggggcggtcgttgcgatgtatgtggtaaggtgtttagttaacgtagtaatttgttgaggtattagaagatttatacgggtgagcgattattcgtgtgtagcgagtgcggtcgtagttttagtcgtagttcgtatttgttgcgttattagtttacgtatatcgaggagcggtcgttcgtgtgcggcgattgtggttagggtttcgtgcgtagcgcgcgtttggaagagtatcggagagtgtatacgggcgaatagttttttcgttgcgttgagtgcggttagagttttcggtagcgttttaatttgttgtagtattagcgtatttacggcgatttttcgggttttggcgttaagttttcggttttttttggtgcgttcgagtttttcggttttttttcgtgtagcgagtgtcgcgagagtttcgcgcggcgcgtcgtgttgttggagtattaggcggtatatacgggcgataagttttttggttgcgtcgagtgcggcgagcgtttcggtcgtcgtttagtgttgttgtagtatcggcgcgtgtatagtggcgagcggtttttcgtttgtgtcgagtgcggttagagttttcggtagcgttttaatttgacgtagtatcggcgtatttatatcggggagcggtttttcgtttgcgtcgagtgtggtaaggtttttcgttagcggtttacgtttacgtagtattttcgcgtatatacgggcgagaaattttttgtttgtttcgagtgtggttagcgttttagttagcgttttaagtttacgcgttattagaggatatatatcggcgaaaagttttattattgcggtgagtgcggtttgggttttacgtaggtttcgcggtttatcgagtattagcgtatttatacgggcgaacggtttttcgtttgtttcgagtgcggttagagttttcggtagtacgttaattttatttagtatcggcgtatttatacgggtgaacggttttacgtatgttttgagtgtggtaaggtttttcgttagcggtttacgtttacgtagtatttgcgtatttatcgacgagagaagtttttcgtttgttaggattgtggtcgtcgtttttattagagtattaagtttatttagtattagcgcgtttatagcgtcgagtagttttagtcgggacgtattgtgttcgttatggttagaatatttattttttttggttattgtgaggttggcgattatataagtataagtaggttcgtttagggtttggttattgtaggtgtttaataaatagtagatggaaattgggtttttatttatttagtgtttttttatttgtgcgttttttattttttattttttagtttttcgagtgttgggttggtgtgttttttttgtaattacgtggtttttgtgagggtttatttttataatatttttttttattttgagagaggtggtttttagtattatttatttcgcgtgtgggatggtcgttatatttagtttttagtttatagagggaatggattagtagtaggtggggtagaattgttttgggtagtttagttttagttttttttgggtaatggatttcggttttttaaatttagagaggaagaaatgttttttgtgagtatttattaagagtatatatgtgtatagtatggtgttatgtttgatttgattgagttttattaagagatagagtatagttaattaggtgttaggtgattgatgggagagtgagaaggttaagttaatttgttttagaaatgggaaagtttttgtaggaagtagttagatttttaggattagaggaataaagggaagtattgtaatttagaagttttaatgagttttttatggagttggaatttaggtttttgagaagagggtattgttgagttagttttggggttttttagttggtagggaagttttgtgggtttgagggggtattgtttagttggtttggaggtttttgtttttaagagggtgttttataggtttaggagatttttgagggggtattggtgtgggtgtttttaaggggtttagtgagtttggttttgggaggtatgtaaaaattgttgtttttggaaggatttgttgttgttaaggggaagaggtggtgttggtttagttttttttttttttttaatttttgttttagtttgtttttaatagatttgtaagtgaagagaggtgtttgtagtttttgttttgtatagtgatgtttaggtgggtaggtttggagtttagttttgtttggtgatgaaattttatgggatttttttttgat

SEQ ID NO: 262 - DNA, 4057 bp, Artificial Sequence
  chemically treated genomic DNA (Homo sapiens)
gttaagggaaaattttatgggattttattattagataaggttgggttttagatttatttatttaggtattattgtgtagggtagagattataaatatttttttttatttgtagatttgttaagggtaggttggaataggggttggaaagggagaagagattaggttagtattattttttttttttggtaatagtaggtttttttaggagtaatagtttttatatattttttagaattaggtttattgggttttttggagatatttatattagtgtttttttaggagttttttaggtttatggggtatttttttgagaatagagatttttagattagttgagtagtatttttttaggtttatagggtttttttgttagttaagagattttaggattggtttagtagtgttttttttttaggggtttgagttttagttttatgggaaatttattggagtttttaagttgtaatgtttttttttgtttttttagttttaagggtttagttgttttttgtaggaatttttttatttttaagatagattgatttaatttttttatttttttattaattatttaatatttagttagttgtgttttgttttttgatgggatttaattagattaggtatggtattatgttatgtatatatgtatttttggtggatgtttatagagaatatttttttttttttgggtttgagaaatcgaggtttattgtttagggagagttgaagttggattgtttagggtagttttgttttatttgttgttggtttattttttttgtaaattagaagttgggtatagcggttattttatacgcggggtaggtgatgttaggagttattttttttagggtgaagaggggtgttgtggaggtgaatttttataggaattacgtggttatagagggagtatattagtttagtattcggggggttggagggtggggagtgaaggacgtataggtagggaggtattgagtgggtggagatttagtttttatttattgtttattggatatttatagtagttaagttttgggcggatttgtttatatttatgtaatcgttagttttataataattaggggaggtaggtgttttgattatggcggatatagtgcgtttcggttggagttattcggcgttgtggacgcgttggtgttgaatgagtttggtgttttggtggaagcggcggttatagttttggtaggcgaagggtttttttcgtcggtgggtgcgtagatgttgcgtgagcgtgggtcgttggcggaaggttttgttatatttagggtatgcgtagggtcgtttattcgtgtggatgcgtcggtgttgggtgaggttggcgtgttgtcgaaagttttggtcgtattcggggtaggcgaagggtcgttcgttcgtgtggatgcgttggtgttcggtgagtcgcgagatttgcgtgaagtttaggtcgtatttatcgtagtggtagggtttttcgtcggtgtgtgttttttgatgacgcgtgagtttgaggcgttggttgaagcgttggttatattcggggtaggtaaagggtttttcgttcgtgtgtacgcggagatgttgcgtgagcgtaggtcgttggcggaaggttttgttatattcggcgtaggcgaagggtcgtttttcggtgtggatgcgtcggtgttgcgttaggttggagcgttgtcggaagttttggtcgtattcggtataggcgaagggtcgttcgttattgtgtacgcgtcggtgttgtagtagtattgagcggcggtcgaagcgttcgtcgtattcgacgtagttaaaggatttgtcgttcgtgtgtatcgtttggtgttttagtagtacggcgcgtcgcgcgaagttttcgcggtattcgttgtacggaaaggggtcgggaggttcgggcgtattaggaggggtcgggggtttagcgttagggttcgggggatcgtcgtggatgcgttggtgttgtagtagattggagcgttgtcggaagttttggtcgtatttagcgtaacggaaaggttgttcgttcgtgtgtatttttcgatgtttttttaggcgcgcgttgcgtacgaagttttggttatagtcgtcgtatacgaacggtcgtttttcggtgtgcgtaagttggtggcgtagtaggtgcgagttgcggttgaagttgcggtcgtattcgttgtatacgaatggtcgtttattcgtgtggattttttggtgttttagtaggttgttgcgttggttgaatattttgttatatatatcgtaacggtcgtttttaattatttcgtttttagtgttggggcggtttcggtttcggtttttgggggagcgttagcgggtggtgattagagtagggtttatatttcggtagggattttcgttcgtggggttttgtttattttttagatcgttggggagtagaagcgtatgcgtaaagttattttcgcgggagggtgattggatttggttagaaaggttagttatgtcgaggttttaggggacgtggaggtgagggtttatattatttggatttgcggagatgttgtttagttgtagcgcgaattttgtatatataaggggattatttatttatgatagaatgtttatcgtgtcgggatttattttatttttggggatatagtgtgaattatagggatttgaaattgattaaagaggtagacggaggcgataaatgtaggggtagggattttatttgtatagatttttttgatgaggtgataatgagatagaatttagtataaggaggaagattgggttatgtgaaaaagttttttaggtttgatttaggttggaaaaaatcgtttttggaagggttgtagggtaagcgtgggggtattgtttaggtggaaaatgatggttttagtaaatgtagggaagtgggtgggtttcggaggttggaggtggagttaatagaaagagggtgtaggtttttggatagtggtttggggtttggatgtgttttgtttgtgatgtttgtggggtatttgaggaatatagattttatgaaggttgtggggaaacgtgagtaagggttttagggtatatatatggtatatagaattcgggtttgtaagtgattaatataggggtgggtatttatagaggagagaagtgggttttagttatattgtgagtattttagcgttagacgttgggtgaaggaggaggtattagtaattttaattgagaattagggtttggagaaggcggaagtttggaggaggttaaattaagaagattgagagagtagtgagggtttttagtggtgagagaaagtttataagtcgttaaagaaaagttagataaattagaatatattaaaggaaattagtaaaaattatattagagttaaaagataaatggttaaaaaataaaaaaaattaaaaaaggataaatggtaaattaaaaaattttttataggtaaaaggttaattaattttttaagtaaagagttataataaattagtaagaaagattaataattttatagatatatgggtaaaggatgtgaataggataggaaatgtagttaatgtttatattttataaaatatattttatttttttttagtaagaaaaatgtattttagggttgaatttatttgttatttttatattttgattgtagggatttaagtgtttttatgtattgttggtaagtataaatgggaagatagtgtggtaaaatttattaaaatagtaaatgttttatattttgtttaagtaatttaatttttaggtatttttttaatagttgtgtttttttttgtattaagtgatttatatataaggtttttaatggtgtgtttatagtgagttatagtggggttttgtgtagttatttaaagatgtagagtatttgttgttgtgtatttaagttggaagatgtataaaaaatgttagatgtggaatagggtggagaataagtatttatgtgtgtgttttttttttttttttttttttttttttttttttttgagattgagttttgttgtgtcgtttaggttggagtgtagtggtgtgatt

SEQ ID NO: 263 - DNA, 7589 bp, Artificial Sequence
  chemically treated genomic DNA (Homo sapiens)
taggtgttggggatggagtaggtaacgaaattttatattagataagtgtaatgaatataagtaagtaaatatttagaaggatgttagagaggaataagggtttagagaaaagaagtaagtagagatgagggataggaagtgttggggtgtagttaggagatcgaaattatttataggatggttagagagagattttgaggtggtgatatttgaataaagaagaaagagttttttagtgtggtttttttaatagtttttttggttttagtttttttttttttaagttttttttcgtttgagagggtaatttgtttttaatatgaaaggaatttttttatttttttttttagaagttttttagtgtttttttgttgatttgtagataattttgtgatttgaacgttattatggtttgaattttgtttttttgtttatttttttttgtttgttatttgtttttatattatgatatttgttttttgggagttttatagtgatttggattttttggttaatagagtttagttattttttagggtttagattaagttacgtttgtgtagaatttttgtattttattgtgggtttatgagtttattttttatgtcgttaaaggatgttgtgtattattttggtatttagttatgtatagtggaattgttagtttttttattattagattgtgagtattttgaggttggggaattgtattttttttagtaaggtttttataagtttttattgagttaataaatttatttatttaatgaagtagtaataaatttatttgtttagtgttaattatgtaggtagtaaaatagtgtttatttttagtattttaagggatatattttgtgggttttgtaatagtgatttatgtcgtcgttgattttgaagagtagagagtatttttttaagatggtatttaataaaatttagagatgtttttttttttaaagatgattttgattttgtttaaggatagtaaatatggtgaaagatttagaggaaaaatttggaaataaaatttttgttttttaaatttttttaattggagttagttttagggagatttagattaattagtttagtttttttatatgtttttttatgtttgatggtgggtttagttatttttgttgggtaattattttgtataggaattgttttaggtatttgggatataaagttgaataaatatttattataagatagatggttgatttgttattattttttttttttttcgaggcgatggaaatatattttttgtaaaatatttttattgagtagaggttgttgggtaaatatagagttagaataaagtgaattataaattttaaaagagtattttaggttgggtgtggtggtttacgtttataattttagtattttgggaggttaaggcgggtggattatttgaggttaggaggtcgagattagtttggttaaaatagtgaaattttatttgtattaaaaaaataaaagaaataaaaaaaattagttaggaatggtggcgggtgtttataatttagttattggggaggttgaggtaggataattttttgaattcggaaggttgaggttgtagtaagttgagattattttattgtattttagtttgggttatagcgtaagattttattttagaaaaataaataaataagtattttttttaagattggaaggttttatgtttttttttttaatagtaagggtttttttatttgaagtaagagaattaagaataatttattaataaattaagtagtaattaattaatattaagtttttaatttgggtattttattcgtttttattttttatagaattagaattatattttgagagttataagaattttattttttattgtgtagaggttttttgttgaagggttaagtggaatttggaatttagtttatgtttttttattattaagttatgtgaagttgtagatttcgtgagtgttttagtttatttgtgttgttataataaataatattataggttgggtggtttaaataataaatttttataatttatagttttggagattgggaagtttatgattaagttattggtaaatttaatgtttaatgaggttatttttattggttcgtagaagttgttgttttgtatttttttgggaggaagagagaaagagttaggttatttgttttttttataaggaaagtaattttattatggaggttttatttttatgatttaattattttttaaaggttttattttttaataatattatattagggttttaatataagaattttgaggggatatagatattggtttatagtagtaagggaggggttttttgattgttttatgtaaagtatttgtatgggtttatgtgtaatttttattgattgtttaagttgttagaaattgttttatatgttttgtgtatatttagttatttttattgatttttttatgaagtaggtattattattatatttagtttatagattagatattagagtataaagtattagtaagttggatatgtttgtattttagtattggtgggttggttttggagtttagattgtttataattttgttttttatttttttaagtagtttttttggttttagagtttaatttttatttttgtgtttgttttttatttttaattttggagtttttatttttttttttatgagattttagatttttatttgtttatttttgtttttagaagtaatagagagataagatttagaatattggttttggtatgaaagttggatttaggtattgtttttgttttttgattttattaagttttagttttttcgtttgttaaatggatataattgtcgttattattatttgttgagaattttttaaaatgttaggtattatgttaagggtattgtataaatttatttattgattttttatagtaattttatgattaatattttgtttttatttttttttttatagttgagtataggtatagaagtttaggtgtttggattaaggttatataattgatataatagtagtttttttataggtatgtgtgaagtattttaatgaaatattatgtgttaagttttttataaggtttttaatatgtatttagttaaatattattatttttgttgttattattgtgttttttatagtttgttaattttagtgatattatttaatttatagttgtataaattttgtagagttatgattttttattaaattttttttgtttttatgatagtttttttaaggttttattgttaaagtaaattttgtaaggtttttttttttttttttagattttttttttttttttttagagattattttgttggttaggttggttttgaatttttggttttaagtagtttttttattttggttttttagagtgttaggattataggtatgagttattttatatagttaaattttgtaaggttttatattttttagaaattagtttatatagttaaatttatagagataacgtggttattaggggttgggagggggaatggggaattattatttaatgggtatataaaaaattttgatgatggatagtggtgatggttgtataataatgtaaatgtatttattgaatgtaattatttaaaaaatggttaaaatggtaaattttatgttatatattttattattaaaaaaagtagttatttatgtatagtagtttttttttatttatagtagatattttttaagttttttagtgaatgatttaaattttagatattattgaattttaaatatattatgttttttttttatttatatatttatgataaagtttaatttataaattaggtatagtaagagattaataataataatttataataaaatagaataatgataaaatattgtaataaaagttttataaatatggttttttttttttttttagaatattttattgtattgtatttatttatttttgggttatagttgattttaggtaattgaaattatagaaagtaaaattatggataggaaggattattgtaattttaaatattattgtaaaagttttaaattaagtatgggaaattaagagagaataataggtattttagaggttaaaggcgaggttaaagtagaggttaaaaaatttttattaaagaatttattagttgagtgtggtggtttatatttgtaattttagtattttgggaggttgaggtaggaggattatttgagtttaggagtttgagattggttcgggtaatatagtatgatttcgtttttataaaaagtaaaaaaattagttggatattgtggtgtatatttgtggttttagttatttgggaggttgaggtgggaggatcgtttgagtttaggaggttaaggttttagtgagttatgattgtgttattgtattttagtttgggtagtagagtaagatttttttttaaaaaaaaaaaaaaaaaaaaaaataaagaatttattggtagaaattattaatgagtataggttttatgttatgtgtttttttgtagttaagaaataaggtattttgaaaatattttttgagtttttttttttatttaatttgtaaataattttatgagattgttaatttttttattgttaatttttttattttatggatgaaagaattgaggtatagagatattaataatttgttttggattttatagcgaataaatagtaatgttataaatttaggtatttggttttagaggggttaaatatttttaatttgggtattttatttttaatttttattttttttagaattagttatattttgagagttataaggagaaattatgttgggggtatattttgtgtggtcgggtaggttatttgttgttagggttttatagttaaagggataagtagtatttggaatttagtttagtttttgtttattaagttagttcgaggaaggaatattgttgttattttacgttaaaaaaaataaaataaaataaaaaaatagttatggttttttttttggttaaatttttatggttttttttttttttttttatgtttttttttttttttttaagatttggtatttttttagaaggaggaggataaaatgacgaagtttaaggtgagttggattttttttttttcgtaataattgttattttatttcggaaagattatatatattttattttttttgttaggaagatgaaggagaacggtagatatttgagaattttttgtgtgttaaatgtttgttgttttttatttttgtgttgtttaatttttgttgttttattttatgattttataatttgataaataagtatagaatagaaaagttagtaataataaaaattttttatttttttattgttttttttataaaataattgttttgattttttatgtttttttttttagatgtatttataattgcgtatttataagtattgtatagataaaatgtttaagttatattttttttaattaatattatttgttttatatttttatagttttttgaattgatgttattttgtggtgtgtatgtgagataatttttttttttatttattaatgtttaggtagtttagaatttttattgaaaattgttattatagtttttttataaataattattttttttaaaaagtaatttgaaggagttttgttattatttatttttaatgttatagaaatattatattgaaaaagtatttttgatatgtggtattttgggtagtttttatgttaatgatttagatatgatatcgtgtgatatgatgttattgattttagagaaaatattattagatatttttataaaagaaagttagattttttttatttaggtttgagttatattttatgtatgtttatttattgattcgtatttttttatttttatgttaatttattttattgaagtaataatgtatttaattttaaaagtttagtagtataagaggatttattagatattttttttattgtatttattttttaaattaattttatgaggtagtttttggttttatgtgtattttaattataaagaaataagattgtagaattgtggaaagttgtttagttttatataggatattaaagatttaattgattttaaaagattttaggatttttatttgattgaagagagagaggtaaagaaaaagaattttttatttagtggatttggttttttttgtgtgggtgtttagtttgttttggttagtggaagatgttttagttaatattgtttttattcgatttattttttagtggtttttttttttttatgattattgttatttatttagggtatttgaatgtgtagggttttagggatgaatagtttttatatgaaaagttaaaatagtatgataatgttggtcgagtatagtggtttatatttgtaattttagtagtttttgaggtcgagataggtggataatttgaggttaggagttcgagattagtttggataaatatggttaaattttatttgtattaaaaatataaaaattagtttggtatagtggcgtacgtttgtatttttagtttttcgggaggttgaggtataagaattatttgaatttaggaggcggagattgtagtgagttaagatcgtattattgtattttagtttggggaatagagtaaggttttgttttaaaaaaaaaaaaaaaaaaattaatacgatatgttagtgtttttttattatgggtgattttatcgtttattgttttttttttttattcggtaatatttggaaatatttttggtattataggtcgggggtgttattagtatttagtaggtagaagttaagggtgttgtaaaatgttttatagtgttttagatatttttatatagtagataattatttcgtttaagatagtaatagtgttgagtttaagaaatatttttgaatataaagttataaaatattagtaaaatgtaggtgaataataacgtatatgttaaaaaacgatttaaaattattattagaaattttatagagttataagataaaattttaaatggaatattaataaaaggatagtaataggtgagatattaaagaaaaataaagatgtttagtaaatatacgaaaatatgattttattagttaattatagattaaaaaatttagttgttttttaatgaatagattgtttaggattttttaaaaattggttatatttagtgttatttatggtatggaaaattaatgatattttattttgggggaaggataagatagggaaaaattgaaaagaaaatttgtcgtatattataatttggaagttgtatattttttgatattgtgattttttattttttggaatttatttaagaaaataggtgggtaatatttatgtaaaaagttgttttttatagtatttattatgaaaaggaaaaatttaaaatataatatattttatatgtgtttaattgtaataaagttgaatatggttttttaagaatttgatatttttttttatatattttttttatattttttagtgttattttttttttagtggatttttattgtaagatttaggtggagtgtgtttgatgttgtagg

SEQ ID NO: 264 - DNA, 7589 bp, Artificial Sequence
  chemically treated genomic DNA (Homo sapiens)
tttataatattaaatatattttatttaaattttgtaataaaggtttattggaaaagggatagtattgagaaatgtgaaaaagatgtgtagggaaaggtgttagatttttaagagattatatttaattttattatagttaaatatatataaagtgtattatattttaggttttttttttttataataaatgttgtaaagaataattttttgtatagatattatttatttatttttttaggtaagttttaagaagtgaaaaattataatgttaaagaatatgtaatttttaaattatgatgtacgatagattttttttttaatttttttttgttttattttttttttaagataaagtattattgattttttatattatagataatattgaatataattaatttttaaaaaattttaggtaatttgtttattaagaaataattgggttttttggtttgtaattaattagtaagattatattttcgtatatttattggatatttttatttttttttggtattttatttgttattgtttttttattgatattttatttagaattttattttataattttgtaaaatttttagtgatgattttaagtcgttttttagtatatacgttgttgtttatttatattttgttggtgttttatagttttgtgtttaggagtgttttttaaatttaatattattgttgttttgggcgggatagttgtttgttgtgtgggggtgtttagggtattgtagggtattttgtagtatttttagtttttatttattagatgttggtagtattttcgatttgtggtattaggaatgtttttagatgttgtcgggtggggggggggggtagtgggcggtaaagttatttatgataaagaagtattagtatatcgtattggtttttttttttttttttttgagatagagttttgttttgttttttaggttggagtgtagtggtacgattttagtttattgtaattttcgttttttgggtttaagtgatttttgtgttttagtttttcgagaagttgggaatataggcgtgcgttattatgttaggttaatttttgtatttttagtatagatggggtttagttatgtttgtttaggttggtttcgaatttttgattttaagttatttatttgtttcggttttagaaattgttgggattataggtgtgagttattgtgttcggttagtattattatattgttttaattttttatatgaagattgtttatttttggagttttgtatatttaggtattttaaatgaatgatagtggttatagagaagaagaggttattggagagtgaatcgagtaggggtagtattagttgaggtattttttattaattaggataagttaggtatttatataaaaagggttaggtttattaagtggagaattttttttttttgtttttttttttttagttaagtaaaaattttggagttttttgaaattagttggatttttggtattttatgtgaaattaagtaattttttataattttatagttttgtttttttgtaattaaaatgtatatgagattaaggattgttttataaagttggtttgaggaataaatatagtaagagaagtatttggtaagtttttttgtattgttagatttttaaaattaagtatattattattttaataaaataagttaatataagagtaaaagaatacggattagtaagtaaatatatatagggtataatttaggtttgggtaagaaaaatttagtttttttttgtggaaatatttaataatattttttttaaaattagtggtattatgttatacgatgttatatttgaattattgatataggaattatttaaagtattatatattaaaagtatttttttaatatagtgtttttataatattaaaagtaaataatagtaaaatttttttaaattgttttttggaaaaaatggttatttgtgggaaaattgtagtaataatttttagtaaaaattttaaattatttaaatattgatgaatgaggagaaaagttattttatatatatattatagagtaatattaatttaagggattataaaaatatggagtaagtaatattaattagaaaagatgtaatttgaatattttgtttatataatgtttataaatacgtagttatgaatatatttgaggaaaagaatatggaaaattaaaatagttgttttgtaagggaaatagtaggaaaatgagagatttttattgttattgatttttttattttatgtttatttattaaattataaagttataaaataaagtaataaaaattaaataatataaaagtaaaaagtagtaagtatttggtatataagaggtttttaaatgtttatcgtttttttttatttttttaataaagagaataaggtgtatgtaattttttcgaaatgagatgataattattacggagaaagggaggtttaatttattttagatttcgttattttgtttttttttttttggagaagtgttaagttttaagagggaaggagaaaatatgagggaaggagaaaaaagttatgagagtttggttaaaaaaaaaattatagttgtttttttgttttgttttgttttttttaacgtgaaatagtaatagtgtttttttttcgggttggtttgatgaatagaaattaggttggattttagatattatttgtttttttggttgtaagattttggtagtaagtgatttgttcgattatatagagtatgtttttaatataatttttttttgtggtttttagggtatgattgattttagggagagtagaaattgagagtaaaatatttagattaagagtatttggtttttttggagttaaatgtttagatttatggtattgttatttattcgttatgaaatttaggataaattattaatatttttgtgttttagtttttttatttataaaatgaagagattaataatgagagaattaataattttataggattgtttataaattaaatgagggaaaaagtttaaagaatatttttagagtattttattttttagttgtagaaaagtatataatataaaatttgtgtttattaatggtttttattaataaattttttgtttttttttttttttttttttttgagagagggttttgttttgttgtttaggttggagtgtagtggtataattatgatttattaaagttttgattttttgggtttaagcgatttttttattttagttttttaagtagttgggattataggtgtgtattataatgtttagttaatttttttattttttgtagagacgaggttatgttatgttgttcgagttagttttaaatttttgagtttaagtgatttttttgttttagttttttaaagtgttgggattataggtgtgagttattatatttagttgatgaattttttagtagaggttttttaatttttattttaatttcgtttttaatttttgaaatatttgttatttttttttggttttttatatttaatttgaggtttttgtaatagtatttaagattatagtggttttttttatttatagttttgttttttgtggttttagttatttgaagttaattatggtttaaaaataggtgagtatagtgtagtaagatattttgagagagagagagagattatgtttatagaatttttgttatagtattttattattattttattttattataagttattgttgttagttttttattgtgtttaatttataaattaagttttattataagtatgtaggtaaaggaaaaatatagtatatttagggtttagtaatatttgaggtttaagttatttattgggggatttggaaggtatttgttgtggataaggggggattattgtatatagatgattgttttttttgatagtaaaatatgtaatataaaatttattattttaattattttttaagtggttatatttagtaagtatatttatattgttgtgtagttattattattatttattattagaattttttatgtatttattaagtaataattttttatttttttttttagtttttgataattacgttatttttatgaatttgattatatggattggtttttaaaaggtataagattttgtaaaatttggttgtgtagagtggtttatgtttgtaattttagtattttgggaggttaaagtgggaggattgtttgaggttaagagtttaagattaatttggttaatagagtgatttttaaagagaaaaaaaaaaaatttaaaaaaaaaaaaaaagattttgtaaaatttattttaatagtagggttttaaaaagattattatagagatagagaaaatttaataaaaaattatgattttgtaagatttatgtaattataaattagataatgttattgaaattaataagttataggaagtataataataataataaaaatggtgatatttaattaaatatatattagggattttatgaagaatttggtatatgatgttttattaaggtattttatatatatttgtgaagaagttattgttgtattagttgtgtgattttggtttaaatatttaaatttttgtgtttatgtttagttataagaagggaaatgaaaataggatgttaattataggattattgtgaggaattaatgagtgaatttatgtaatgtttttggtatagtatttggtattttagggagtttttaatagatgataatgacgataattgtatttatttaataggcgaggaagttgaggtttggtgaggttaagaggtaggaatagtatttgaatttagtttttatattagagttagtattttaaattttgtttttttgttgtttttaaagataaaaataagtagatgggagtttaagattttatggaaggagaaatgagggttttagagttaggggtaaaagatagatatagaaatggagattggattttgaagttaagggagttgtttgagggagtagagaatagagttgtgaatagtttagattttagaattagtttattagtattggaatataggtatgtttaatttgttagtattttgtgttttaatgtttaatttataaattggatgtaataataatatttattttataggaaggttagtgaaagtgattaagtatatataaaatatgtggaatagtttttggtagtttaaataattaatagaagttatatataaatttatgtagatgttttatatgaaatagttagggagttttttttttgttgttgtggattaatgtttgtgtttttttaaaatttttatgttgaagttttaatgtgatgttattgggaggtggggtttttaggaggtaattaggttatgagggtgaagtttttataatgggattgttttttttgtaagaaaagtaagtaatttagtttttttttttttttttttaggaagatataagataatagtttttgcgaattagtaagagtggttttattagatattggatttgttagtgatttgattatggattttttagtttttaggattgtgagttataaaggtttgttgtttaagttatttagtttatggtattgtttgttatagtagtataaatggattaaggtatttacggagtttgtagttttatatggtttgatgatggggaaatatgggttggattttagattttatttgattttttagtagagagtttttgtatagtgaaaaatggagtttttgtagtttttagggtatgattttgattttatggagggtggaaacgagtaaaatatttagattaaaagtttagtattagttaattattgtttgatttattagtaaattatttttagtttttttattttagatagaagaatttttattattgaaaagggaaatataaaattttttaattttagaagaaatatttatttatttatttttttgaaatggagttttgcgttgtggtttaggttggagtgtagtggaatgattttagtttattgtaattttagtttttcgggtttaaaagattattttgttttagtttttttagtagttggattatgggtattcgttattatttttggttaattttttttgttttttttgtttttttagtatagatgaggttttattattttggttaggttggtttcgattttttgattttaagtgatttattcgttttggttttttaaagtgttgggattataggcgtaagttattatatttagtttgaaatatttttttagaatttgtaatttattttgttttaattttatatttgtttagtaatttttgtttagtaagaatgttttgtaggggatatatttttatcgtttcgggaaaaaaaagagataatagtaaattaattatttgttttgtgatgaatgtttatttagttttatattttaagtatttaaaatagtttttgtataaagtaattgtttagtagaaatgattgaatttattattagatatggagaggtatataggaagattagattagttggtttaagtttttttgagattgattttagttgggaagatttggagagtaagggttttatttttaaattttttttttaggttttttattatatttgttgtttttgggtaagattagagttatttttggaaggaaaagtatttttggattttgttaaatattattttaggaaagtattttttgttttttaaagttagcgacgatatgagttattgttatagaatttatagaatgtgttttttaaaatattgagaatgaatattattttattgtttgtataattagtattagataggtgaatttattattattttattaaatagatgagtttattaatttagtgaagatttgtgggaattttattaaaagagatgtaattttttagttttaagatgtttatagtttagtgatgaggaagttggtaattttattatatatggttaaatgttagagtagtgtatagtattttttagcggtatgaggaatgggtttataagtttatagtggaatgtaggggttttatataaacgtagtttaatttgagttttggagggtgattgagttttattagttagagaatttaaattattataaaatttttagagaataaatgttatgatgtgaagataaataataggtagaaagagatgggtaggaaggtagaatttaaattatgatgacgtttaagttataaaattatttgtaagttagtaggagaatattgaaggatttttggaaaggagagtaaaaagattttttttatgttagaaatagattatttttttaaacgggaggaggtttgagggggaggaggttagggttagagagattattaggagagttatattaagaaatttttttttttttatttaaatgttattattttagagtttttttttagttattttgtagataatttcggttttttaattgtattttaatattttttattttttatttttgtttattttttttttttaagtttttatttttttttaatatttttttaggtatttatttatttatatttattatatttgtttaatgtggagtttcgttatttgttttatttttaatattta

SEQ ID NO: 265 - DNA, 6421 bp, Artificial Sequence
  chemically treated genomic DNA (Homo sapiens)
gtttttttttttttttatggtatagtttttattagtaatgtagttgtttttgtttaataataggtttcgaatgattaatatgataatatggaggttttaatagttgttaatcgaattttaggttttttttgtttgaatttagggaaggattttttgttttttgagatgtattttaaacggttatgtgttgttgaagggtttggaaatttagttttatttgattttatttttttttatttttatttggaatgattatagtttttgtattagggtaaagttaatcgttgttatttaggttgtttttttttgatcgattatttttttttaggatttttggtgttttgaatagtaggtatagagaagattttttaaggttacggtagtagatatttttttttagtttatgttatcgggtttttaagttggaagttttattgtcgatttataattagttcgtgtggtattgttttttgaggttgtttttttttggatatttttggtgtgatggtagtacggttatttttaacgtatagtagagtttttatttttagggtttttgtgttatttttttttgtgtgtgcgtagtagtttttattgttgtttttaaaattttagttttgtggttgttttggtattcgtgggtttttgtatggtatggtgtttaggtggggttagttgtttgttttagtttttcgtgaggtgggcgttgtggtttttggaggtttttggtttttagttttttgtttttcgaaatttttgagtttttaggtttattttaagttgtggtttggtttatggtagtggagttgtgtttattttgtttacgtttatttatttttgttagggttttttgggagtattttttttcgtttttggtcgggtgaggatttagggcgtttttttttattttagtagggagattagtttaggtttgtaggttggaaattttgtttgaggaaaatagtttagaggtttggagtgagtttggggaggtgtagtaggtagggtttgaatcggcggatttttatatttagttagttaggcgggttgtttataggatatttgaagggtaggaagcggttgttaagattttatttttaaagatgtttagttggtataagtttttagttttttttgatttggttgttagagaaaagtagattttgtttgtggttgttattatgttattttaaatagattattattatagggaggtacgatttttgtattttgatgggtgcggtatgggtgaggattgattgtttagagggtttagggtgttttttaggaatatttatagtatcgcgatttgatgtttattttattttattttatagtagtttagtgtttttttggtagtgtttatttttttttagtttattcgttaggtattgtttttttttaggtgttttttttattgtatagaggtttggattcgattttacgaagatattttgaaattatgtattagagagtgtgtgtatagaatgaagaattttttgtttgtagggtttcgtttttgttttttagggttatttaagtatttggggttttgattttggagaggttgttttttttagggttagttaatttttagagacggtaaatattttttttttagtgtattttttttttttttttttgagacggagtttcgttttgttatttaggttggagtgtagtggcgtgatttgggtttattgtagtttttgttttttgcgtgtaggcgatttttttattttagttttttgaatatttgggattatatgcgtgtattattatattttgttaatttttttgtattttaatagagacgaggttttattatgttggttaggttggttttattttaggtgatttgtttttttcggtttttaaagtgttgggattataagcgtgagttattgtgtttagttttagtgtatttttgagatataaattaattaatttagagtttataattattttttttttttattatacggttatttattaagttaatattttttttgttttaagtaattcgagggttaggtatcggataagaaggggttatttttatagttttgagtttgttataattgtttaaatagtttaatcgtgagtttattttgtatatttattttgtttgttttttttttttagagaaaataaaggtttcggttaaatttagttttttttttttttttgttttttggttatttttggttttttttatgtcgttttgtgtgttttgtttagtttttagggatttacgattataatttttttttttataatagttatttttacgtgtgtatgttttattatatttgttaaaataaatttacgggttcgggcgcggtggtttacgtttgtaattttagtaatttgggcgatcgaggtgggtagattttttgaggttaggagttcgagattagtttggttaatatggtgaaatttcgtttttattaaaaatataaaaaattagttaggcgtggtggtaggtgtttgtaattttagttattcgggaggtcgaggtaggagaatcgtttgaattcgggagtagaggttgtagtgagttgagattgttattgtattttagtttgggtaataaaagtgaaattttgttttaaaaaataaataaataaataaaaaataaatttaggatatatttgaatttattttgagatgtgggtgtttgtatttattttgagatgtgggtgtttgtagatggtaagggatttgtggaggggttttgtggattggaagtattattgttttgggttgtttattcggatacggagagtgttgttggaaatgtagtattttgaaagtgtttttgtagttgagatttttttttggaaatatttatagtttggaattgttttatttggttaaatatgaggaggttagagttgttttaaaagtggtagtaagggagttgttttaaaagatttttttaaatagtttcgcgatggaattggttgggattttaaggaaagaagttttaaacgttagggtgattagtttagagtatttttttcggaaatttttatatggagttttagtttttttgggatcgatgatgaggtaagggatgttttatttaggtatatttgtagtaagggattttggttatggagtttagatgagagtttaagggattggatttagggtagggttagtttttacgtgtttagtaatagggttgattgtgtttttaagtaatttaaatagttttattagggaatgtgttcggttttattgaattgggtttaaggttgtagggaatacgtaatggttaggttttagagtaattaaaggattttgtgttttttaattagtagagaaagaaaagggggaattggaagattttgtgaattttaattttagttagggatgagtaatttaggttggtttagagtataagtatcgtgattatgtgagggtttgagtgtgtttggttttggagggtttgtttgtttagtggtttttagatttagtcgggtagtggatgtagtggatggaggaagttttttcgttttagataggattttagggttttagagttttggtatttgtattttggatataaggaaggtgtttatgaggtggatgttttagttaggtttttttttttttttgtttttgtgttattttggtgtgttttttttatttgtagtaggttaggttggggtatagggttgtcggtttttattagttttgggggtttggagggcggttggggaagtagattttttgtttttttttatttttcgcgatatgttttttgagtagttgtagtttatttagatgattagagaggatgtggggttgagggagtcgaattcggggtagtaggggcgggggtgggagtgtcgggattattcgtatcgggagaggcgaggtcggcgtttgttttttatttgggtttttttggggggttgggggttgtttgattttttttttttttggtttgcgtaagttttttcgcgcgggttcggattaatacgtcgggggagttcggtttacgttttttttggattttcgtttcgtttttttcgtggggaggggcgcgttaggcggatttggtatttttcggttgttgggtttcgtcgggagttacgcggggaggtttaggtagtcgggacgtaggtagcgttttcgtcgaggttgcgagttcgtggtcgttcgggggaggcgcgtaggttttgtcggacgtagaaggaattcgaaggaggcggggtggagggcggtgcggggtcggggaggggcgaggcgagtggcgagtggacgtcgggttcggtttcgggtaatttcgaggggcgttttttttcggggtttcggaggttttgcgatttcgcggtcgttttagtcgtttattggggataaggttcgagttaggcgttttcgcgaggcggggtttatagcgcgtttagtaggcgttttttgtcgtagggacgcgggggagcggcgtttgaatagtttcggtgggaattagcgttcgaagttggtgattcggggtgcgtagggtttaatcgggcgattttttggattttcgttagtttcgtttcgatttcgttttttttattcgttagcgagttcgtaattttcggtttcggttcgcgtttttagttttaggtttcggtttcgtttcgtttttgtttaggtatcgtttatttcgggttttgggtttttttttttttcgcggtttcgttttttgttcgtttttgattgtatttcgtttttaggcgttagtttcgtttatttgggtttttggtttcgtttaggtttttgtttttcgggttttagtttcgttttttttcggttttgattttatttttttttcggagtttgggaggcggggttgagaattatagagatggtcgggttttcgagcggtttagggcggtcggaagtttgcggggcggggcggacgcgggtggttaaggttcgttttcggcggcgtcgcgcgtttgcgagtttcgggtggtttttagggagggtgagtcggcgcggcgggcgcggattcgggttgttttcggttcgagtgatttttggtcgtttttttagttttttcgttttcggtattggggttttcgcgtttttcgggtttttaggcgggaaagcgcgggggttttgcggggttttgagcgtttggtgtgggaggtggtcgagtttagttattttttttcgcggcggcgcgaggtgggtttcgtttggtcgagtttcgtagtttttcgtagatttcgttcgtggcggttacggtgttcggggtttgagtaaggcgagttttagttgcggttttttttttaggtttgggtttattttcggggttttgattttttttgcgaaattatttttttttagagttttttttttttttatttattgtttcggaaggtttaggataagtgatagtggaggaaggaacggtgttttgggtggggtaggttgtttgttttttttaaattttggttgttatttcgggtatttttattgttaggagttaggtggggggattagtttatttgtgtcggtgatttggggtttttatttataaattattttttgggttagaagttgttatacgaagatttttttttttatttcgatttttcgggggaatgtttgggtaggtagagggtttggggttattggtttaattgaggtgaacgatttatattagattatatttttgtgtttggttttattttggcgataggtgagttggagattggaatttatgtatttgagggtaggggtttttatgtttatttttgttttttttatagtttgttatttttgtttttgttttttttaatttttagtcgtttattgttttttttaatttttagtcgtttattgtttttttttgttgtcgggaatttatttatattggtttatttaattttatttttttttgttttaggtttttttatatgttatttttgttgtttggagtgttttttttatttttattattttggtcgaggtttttggggaagtgatttattatattgaacgttttagtttaagtggtttttatagttttttgtatttgagcgttgtcgtggttgtagtgtgtttatttgtgtggttatttaattttttttttcgttagattgtttcgtgaaggtagggttttcgtgtttattattgtatttttattatttagtgtttggtacgtggtatttattttttacggttttgtggagtgagttatatatgttatatatatatatattttaaagaggaataagagtttagtgggttttttttatttaagtgttatggttgttttagtttagttttatgtttttgttagagaaatttggggttggaggtaaaggagtagagagtatagtatttttttgattagtttggaagttgggtttttggtattttgatttttaatttttttataattgttaatagg

SEQ ID NO: 266 - DNA, 6421 bp, Artificial Sequence
  chemically treated genomic DNA (Homo sapiens)
tttgttggtaattatgaaaggattagaggttaaggtgttagaagtttaatttttaggttaattaagggggtattgtgttttttgtttttttatttttagttttagatttttttagtagggatatggggttgggttgaagtagttatggtatttgagtgaaggaggtttattgaatttttgtttttttttagagtgtatgtgtgtgtggtatgtgtgatttattttataaagtcgtaagaagtggatgttacgtgttaggtattgagtaatggggatatagtagtggatacgaggattttgtttttacgaagtagtttggcggaggaaagagttaaataattatataaataagtatattgtaattacgatagcgtttaagtatagggaattatgaaagttatttagattagaacgtttagtgtaatgggttatttttttagggatttcggttaaggtaatggaggtggagagagtattttaggtagtaggaatagtatgtgaaagggtttgaagtaagaagaaatggggttggatgaattagtgtgggtaaattttcggtagtaagggaaggtagtgagcgattggaggttggggaaggtagtgagcgattggaggttggagaaggtaggagtaaaaatgataaattgtagggaagataagagtggatatggaaatttttgtttttaagtatataaattttagtttttagtttatttgtcgttaggatggaattaggtatagggatgtaatttgatataaatcgtttattttaattaagttaatgattttagattttttatttgtttaggtattttttcgggaggtcggaatgggaaaaagagttttcgtatggtagtttttggtttagaaagtggtttgtgggtggaagttttaggttatcggtataggtaggttgatttttttatttggtttttgatagtaggaatgttcggaatagtaattagaatttagagaagataaatagtttattttatttaaggtatcgtttttttttttattgttatttattttaggtttttcggggtaataaatagaaagagaaaaggttttagaaggaggtgatttcgtaggaggagttagggtttcgggagtagatttaggtttgaagaaaaggtcgtagttggagttcgttttatttaggtttcggatatcgtggtcgttacgagcggggtttgcggggagttgcgagattcggttaaacgaagtttatttcgcgtcgtcgcgggggagggtggttgggttcgattattttttatattaggcgtttaaggtttcgtaaagttttcgcgttttttcgtttggaggttcgggggacgcggggattttaatgtcgaaggcgggagggttaaggaagcgattagggattattcggatcgagggtaattcgagttcgcgttcgtcgcgtcgatttattttttttgaggattattcgaggttcgtaaacgcgcgacgtcgtcggaaacgggttttggttattcgcgttcgtttcgtttcgtaaattttcggtcgttttgggtcgttcggaggttcggttatttttgtggtttttagtttcgttttttaggtttcggagaaggggtggagttagagtcgaggaggggcgaggttggggttcgagggataagaatttgggcgggattagaagtttagataggcggggttggcgtttgggggcggggtatagttagaggcgggtagggggcggagtcgcgagggagaggagggtttagagttcggagtgggcggtgtttgagtaggggcggggcggggtcggggtttggagttggggacgcgggtcggggtcgggagttgcggattcgttggcgggtgggaggagcggagtcggggcgaggttggcggagatttaggggatcgttcggttgggttttgcgtatttcggattattagtttcgggcgttggtttttatcgaggttgtttaggcgtcgttttttcgcgtttttgcgataggaggcgtttgttgggcgcgttatggatttcgtttcgcggagacgtttggttcgggttttgtttttagtgagcggttggagcggtcgcggggtcgtagagttttcgggatttcgaggaagggcgtttttcggagttgttcgaggtcgggttcggcgtttattcgttattcgtttcgttttttttcggtttcgtatcgttttttatttcgtttttttcgggttttttttgcgttcggtagagtttgcgcgtttttttcggacggttacggattcgtagtttcggcgaggacgttgtttgcgtttcgattgtttggattttttcgcgtggttttcggcgaagtttagtagtcggagggtgttaggttcgtttgacgcgtttttttttacgggaagaacggggcgggggtttaggagggacgtaagtcgggttttttcggcgtgttgattcgaattcgcgcgggaaaatttgcgtaaattaaaggagggaagagttaggtagtttttagttttttagggaggtttaggtgaaaaatagacgtcggtttcgtttttttcggtgcggatgatttcggtatttttattttcgtttttgttgtttcgagttcggtttttttagttttatattttttttggttatttaagtggattgtagttgtttagggagtatgtcgcgaaggatagggaaggatagggggtttgtttttttagtcgttttttagatttttagggttggtaggggtcggtaattttatgttttaatttggtttgttgtaggtgaggggggtatattagggtaatataggagtaggagggggagaaagtttggttagagtatttattttataggtattttttttgtgtttagggtgtagatgttagggttttgaggttttgaggttttgtttggggcgagggggttttttttatttattgtatttattgttcggttgagtttagaggttattgagtaagtagattttttaaagttaggtatatttaggtttttatatggttacggtgtttatgttttgggttagtttggattgtttatttttagttgagattgggatttatagggttttttagtttttttttttttttttttattgattgagaaatatagagttttttgattgttttgggatttggttattgcgtgttttttgtagttttgaatttagtttaatggggtcgggtatattttttgataaagttgtttaggttgtttgaaaatataattaattttattgttaaatacgtagaaattggttttgttttgagtttaattttttaaatttttatttaagttttatagttagagttttttgttgtaaatgtatttgggtggagtattttttgttttattatcgattttaagaaagttgaagttttatgtgaaaattttcggaagaaatgttttggattgattattttggcgtttagagtttttttttttggaattttaattaattttatcgcgggattgtttggggaagttttttgaggtaatttttttgttgttatttttggggtaattttagtttttttatatttggttagatagaatagttttaagttgtaaatgtttttaggaaaaaattttaattataaagatatttttaaggtgttgtatttttaatagtatttttcgtattcgagtggatagtttagagtaatggtgtttttaatttatagagtttttttataggttttttgttatttgtagatatttatattttaaggtgagtgtagatatttatattttaaggtgagtttaaatgtattttggatttgttttttgtttgtttgtttgttttttaaggtagagttttatttttgttgtttaggttggagtgtaatgatagttttagtttattgtaatttttgttttcgggtttaagcgatttttttgtttcggtttttcgagtagttgagattataggtatttgttattacgtttggttaattttttgtatttttagtagaaacggggttttattatgttagttaggttggtttcgaatttttgattttaggagatttgtttatttcggtcgtttaaattgttgggattataagcgtgagttatcgcgttcggattcgtggatttgttttaataggtgtggtaaggtatgtatacgtgagaatgattgttgtgaaggaagaagttatagtcgtgggtttttggaaattgggtagggtatatagggcgatatgagaaggattagggatggttaggaggtagaaagggggagaggattgagtttggtcggagtttttattttttttggaaggagagggtaggtagggtaggtatgtagagtgagtttacgattggattatttgaataattgtggtaggtttagggttgtaggggtggtttttttttgttcggtatttggttttcgggttatttagggtaggggaaatattggtttggtgagtgatcgtgtgataagggagggagatagttgtggattttggattggttggtttgtgttttaaaggtgtattggggttgggtatagtggtttacgtttgtaattttagtattttggaggtcgaggagggtagattatttgaggtgagattagtttggttaatatggtgaaatttcgtttttattaaaatataaaaaaattagtagggtgtggtggtgtacgtatgtagttttaggtatttaggaggttgaggtgggagaatcgtttgtacgtaggaggtagaggttatagtgagtttagattacgttattgtattttagtttgggtgatagagcgagatttcgttttaaaaaaaaaaaaaaaaggtgtattggaaggggagtgtttgtcgtttttgggaattagttagttttggagggagtagtttttttaggattaaggttttaaatgtttgggtgattttggagagtagggacggagttttgtaaataaaaggttttttattttatgtatatattttttggtgtatggttttaaaatgttttcgtgaagtcgggtttaagtttttatgtagtggagagaatatttagggaggaatagtgtttgacgggtgagttggggaggagtgggtattgttaggagggtattgggttgttgtgggatggggtgaggtgagtattaggtcgcggtgttgtaggtgtttttggaaggtattttgggttttttggatagttagtttttatttatgtcgtatttattagagtatagagatcgtgtttttttgtagtgatgatttgtttgggatggtatgatgataattataagtagaatttgtttttttttaatagttaaattaagagagattggaggtttgtgttagttgggtatttttgggggtgagattttggtagtcgttttttattttttaagtgttttgtgggtagttcgtttggttagttgggtatgagggttcgtcggtttaggttttgtttgttgtatttttttaggtttattttaggtttttggattgttttttttaagtaggatttttagtttgtaaatttgagttaatttttttgttggaatgaggggaggcgttttggatttttattcggttagaaacgggggagagtgtttttaagggattttagtagaggtgagtgagcgtgaatagggtggatatagttttattgttataggttaggttataatttggagtgggtttgggagtttagaagtttcggaggatagagaattaggagttaggagtttttaagagttatagcgtttattttacggagggttggggtagatagttggttttatttgggtattatgttatatagagatttacgagtgttagagtagttataggattggggttttgggaatagtagtagaggttgttgcgtatatatagaggaggatggtatagaggttttggagatggaggttttgttgtgcgttggggatggtcgtgttgttattatattagggatgtttagggggaggtagttttaggaagtagtgttatacgggttggttatgagtcgatagtgaggtttttagtttgaggattcggtgatatgggttgggagagggtatttattgtcgtgattttggagggttttttttgtgtttgttgtttagggtattaggggttttgaggggagatggtcggttagggaggagtagtttgaatgatagcgattggttttgttttggtgtagggattgtggttattttaggtgagggtgaggagaagtgaggttaggtgaggttgggtttttaggttttttagtagtatatggtcgtttgaagtgtattttaggaggtaagggatttttttttgggtttaagtaggagaaatttggggttcgattagtagttgttaggatttttatgttgttatattggttattcggggtttgttgttgaataggaatagttgtattgttggtgggggttgtattatggaggagagggggagt

SEQ ID NO: 267 - DNA, 6063 bp, Artificial Sequence
  chemically treated genomic DNA (Homo sapiens)
gtttgaatttaggaggcggaggtggtagtgagtcgaggtcgtgttattgtattttagtttgggtaataggagtaaaattttattttaaaaaataaaaataaaaataaaaaaaacggttaggtatagtggtttatgtttgtaattttcgtattttgggaggttaagataggtagattataaggttaggagtttgagattagtatgattaataaggtgaaattttatttttattaaaaatataaaaattagtcgggcgtggtggtacgcgtttataattttagttatttaggaggttgaggtaggagaatcgtttgaattcgggaggtagaggttatagtgagttgagattatgttattgtattttagtttgggtgatagagcgaggtttcgttttaaaaaaaaaaaaaaaaaaaaattttaaaaattaatttatttgggagttagttgatatatttatgtatattttttattttattattgtttttatttttattatagtttttgttttattttataaaagaaaggaatgttttttttttatattgaattttgatgtatggtttagggtgtaaaaatttgaggagtttggagggagtaattattttttattttatattaaaatatttttattgtaattagtttttttattttattttatataaaatgtttattattttttattttttagtaaaaagtgaaattgttagttgtttaatttattattttttagtaaatatagtttttttttttaaaaaatatagaagaaaaaaatttgtgtaataagattattagttatttttgatttttagatatgatttttatttaattgtttttaaaagttgaataataagagtttgatgaaagtaggtatatatatttattaagggaatatatgttttttatatgattttttaaaattgatggatttaattatatattatatagtattatttttaattatataatgaaaaatagtattattttatttttattatttattatgttaatagtaggtttaaataattttaattttgattggtttattagtggtttattttataagttatagttaattatttattttttaataatttttataatattttttaaaatgaatgttaatatatttatttgaatggaagaataaagttagatatgtttttaatagaaagtaggtttgatttggttgattggtttgaaatgaaaattggttttgttaattttataaatggtagttgttttttatatagtgaatgagttgaatttgtattttagtttaataaaaagtttttgaagatatgtaataattaaagaattttattaaaaaatattgtgtaggtaaagaagtatggaaattaatatttgattaataaagtgtttttgagtgtaaaggttatagataattaataattatgtttaataaaattaaaattgagattttaataattaaatttttttggaagtttagtggtttttaattttttgtttttaataaaattaaaagaagattttatttgatagtattaatagattattttgtgattgttggtatataatttagaagtttaaagatttaaagaatattattgtaataaattttttttttttttaattgtggaaataaggttttttaatatttatgtttataaaaataaaaaataggtaaaggattgatgttgtattttatttttttttattattaggtaatattaatttatgaatatttgaattaattggggagaaatattatattttttattaatagatgtatttttaataaaaattgtattttttaggttttataagttataaaaatgttaaaaatatttaggaaaatttagtatttagtaatatttagtaaaaaaaaaaagtttagtaagttatatattaatgattataggaagtgaatggaatttaaagtataaggagaaagagaattatataaaatttttgttgaagagtttgtttatatatttttaagtggatgatggtaggtattagatttttagggtatttggaatttatcggatatttttttttaatgtgagatagttttattttgtagtttaggttagagtgtagtggtacgattttagtttattgtaattttcgtttttcgagtttaagtgatttttttgttttagtttttcgagtagttaggattataggtacgtattattatgttcggttaatttttgtatttttagtagagatagggttttattattttggttaggttggtttcgaatttttggtttcgggattcgtttgttttagttttttaaagtgttgggattataagtatgagttattgtgtttgttttgttagatatattaagaatgatgtagattaagtgtggtggtttatgtttgtaattttagtattttgggaggttaaggcgggcggattacgaggttaggagatcgagattattttggttaatattatgaaatttcgtttttattaaaaattagttaggtatggtggcgtatatttgtagttttagttattcgggaggttgaggtaggagaattgtttgaatttggaaggggaagttgtagtgagttgagatttcgttattgtagtattttagtttggttgatagagcgagatttcgttttagaaaaaaagaatgatgtaagttttagtttaagatgttaaaatttgaaattgtattttttataagtatttaaattaatgaaggaaaatttaggtattaatttaaaaatgaataagaggtatatagttttttaaaatttttttatgggtttattttaaaaaatgtttgaagattattagtttatatgttgagtggaagggataggagagaaattgttagtaatggtttttaatattgttttttaaaatatttttattaatttttttgagaatttgaaattattttttattaggattattattttagatttagatattgttttttagagtttttgttaaatgtataattgtagaggtgattggttattagattacgattcgtaaggaatgtgagaaaagatagatatatatatatagagagagttatggaaaaagggtggttggagagggataaatttaggtatagtttgagttttattttttgcggtatttttaatttttaatttatattataagaggagttatttaattttttttttgtatttataaggtattttttttttttttttttttttttttttttttgagacggagttatattgttgttcgcgttggattgtaatggtgcgattttggtttattgtaattttcgtttttcgggtttaagtaatttttttgttttaattttcggagtagttgggattataggcgttcgttattacgtttagttaatttttttgtatttttagtagagagggggggttttattatgttgattaggttggtttcgaatttttgatttcgtgattcgttcgttttagttttttaaagtgttgggattataggcgtttaagttacggcgttcggtttataagttattttttatgggaaataatttgttaaatttttattaaaaaggaatggaaagagggtagtatagtggttaggtagtttatttttatattaggagatatagaagggattaattttaatcgtaggaattttaattattaaatgttatttattggtttatttaaattgaattttggttttagttagaataagttaggaagaggggatgtttaagatcgaaaggggggttttttagttaagttttttaggtaggagaggaaaaggatgttcgtatttttaaagatatttttagttattataagttttaaatttcgtattttgtaattgtgtttagtttacgttttttaaaaattatttttattaagttaaattgttttcggggcggggaagatataaaagaaattagttaaagtttgaaaggatagagaggggaaagttttttattttatttttttagttatttagttttttttttaaaaggtaatttttattagttttttttttaacgttttttttttttaatttgattttttatcgaaagttcgtttttttttaatttttttttaggtttttgaaaattttttaatcgtagttttttttagtagggaaatagtaaaggggtttggtttttatgtttaatttaaagtaagtttataaaagggagtagtcggtttcgagtttgacggtggagttgacgcgggaatgagagagaatttgagaagatcgttagggcgttttttttgcggaggcgagttttttatcgtttttttatatcgttttttttaataaggagtttttaatatttgtaattgttttttttaaggggtggttggaagattagtaggtaaggtttgcggattgcgtattttaaagcgtttcgggatcgtaagatagtgagtgttgagcgcgcggtcgggaagaagtttggaggttttgagttcggaggatagagatcgaagttttagggtttgcgttttttataatttgcgttttttgttttttcgcgttattttcgaagcgtattttttcgttcgtaggtcgtagaagtgatgacgtaaagttttcggggttttcgttatttttttacgtttttgttggatcgaatttttggaatggataggtagcggttttcgattgttatagcgacgattcggtttcgagtcgcgtttaggttttgattcgggcgtcgtgacgttagtacgttttttttgggcgtttagtttcgttggttatgcgttatttcggttttggtgggggcggggtttcgaagagttcggtttagatttcggtcgtttgggttttaggagtttcggaattaggataagttggatggttgtcgcggcgaagcggggggcggggtggatcgtgttcggtattttttatacgggtttcggggttcggtagaggcgcgttaagaggaaaggaaagtgcggcggttttggaatttggatatcgcgcgaggtaagttgcgcgcgggcgggcgggttatggcgtaggcgggttgtggggtcggcgttggtggcggggttcggtgtatggcggtttgtcggcggagtcgttttcgggggttgttaggttggtggttgcgggaggagtgggttaattatgtttagggcgggaggtcgggcgggcgtaggatttcgggaaggtttcgagttcggcgtgtttattttttttcggttttagtagggcggtttggtcgttggatcgcggtcgggtttttttttttatttagggtttttgtttttttttttcgttttgcggtttttttttcgtgatttttaaattttatttcgtgacggcgttcgtttttatttttgtgattttatattttatttattgattttaagattttattaggtaatcgttggttattatttattggttgttaatttaggaatttttttagtattttttagagatttattaattagtgatttttttagttttaattcggtgatttatatgattttgagatttttatatttttttttagtgatttttaaatttgggtaatttttttggtttagtaattttttcgattttattttgtgttttttataaattcggtgattttttttaaaattttgttggcgatttttaagttttattttaatagttttttacgtatttattttgtatataatttttagtatttttattttgtagtcgtatgattttcgttttacgtttgtttttattttaaaattatttttattggtatttttttttgcgattttagttttttagtgttaattagtatatgatttataagcgtttagtatttttttggtgttaaggaggatatagagattaatatgaagtagtaataattggaggtattagagaattttggattaatttagaatttagttaatttagtgtgtggttttagttttgttattgttgtgttttagggatttgtgagaagttttttttttagtttggattttagttttttattatgattgtgatgaggttgggttagatgatttttgagttttttttcgtttgtgaaattgtgaaattatgtagtttttagttaagataataattttttgtaattattt

SEQ ID NO: 268 - DNA, 6063 bp, Artificial Sequence
  chemically treated genomic DNA (Homo sapiens)
aaatgattgtaaaaaattattattttgattgagaattgtataattttataattttatagacggaaggaaatttaaagattatttaatttaattttattatagttatgatgagaaattgaggtttagattgaggaggggattttttataggtttttaaagtatagtagtgatagagttgggattatatattggattgattggattttggattgatttagaattttttgatgtttttaattattattattttatattaatttttatattttttttagtattagaaaggtgttggacgtttgtaagttatgtgttgattgatattgaagggttgggatcgtagagagagatgttagtgggggtgattttaggataaaggtagacgtggaacgagggttatacggttataggataaagatattgagggttgtgtataaggtgagtgcgtggaaaattattggagtagggtttaggagtcgttagtagagttttgaggggagttatcgagtttgtggggaatataaggtagaatcgggggggttattgggttaggagggttatttaggtttgggggttattaaggaggagtgtggggattttagggttatgtgagttatcggattaaaattgagggagttattggttggtgggtttttgagaagtgttggggaaatttttgggttagtagttaatgaataataattaacggttatttggtgaggttttggggttagtgggtggggtgtggggttataagggtggaggcgggcgtcgttacggggtgaggtttgggagttacgggggaggagtcgtaaggcggaaaagaggggtagggattttgggtgggggagggggttcggtcgcggtttagcggttaggtcgttttgttagggtcggagggaggtgggtacgtcgggttcgggattttttcggggttttgcgttcgttcggtttttcgttttgggtatggttggtttatttttttcgtagttattaatttgatagttttcgagggcgatttcgtcgatagatcgttatgtatcgggtttcgttattagcgtcggttttataattcgtttgcgttatagttcgttcgttcgcgcgtagtttgtttcgcgcgatatttaggttttagggtcgtcgtatttttttttttttttggcgcgtttttatcgggtttcggaattcgtatagaaaatatcgggtacggtttatttcgtttttcgtttcgtcgcggtagttatttaatttattttggtttcggggtttttggagtttaggcggtcgggatttgaatcgagtttttcggagtttcgtttttattaaggtcggggtgacgtatggttagcgaggttgagcgtttagggaaggcgtgttgacgttacgacgttcgggttagggtttgggcgcggttcggagtcgggtcgtcgttatagtaatcgggaatcgttatttgtttattttaaggattcggtttagtagaagcgtgaggaggtggcggaggtttcgagggttttgcgttattatttttgcggtttgcgggcgagaaggtgcgtttcgggagtagcgcgggaggataggaggcgtaggttgtgagggacgtaggttttggggtttcggtttttgtttttcgagtttagagtttttaggttttttttcggtcgcgcgtttagtatttattgttttacggtttcgaagcgttttaaggtgcgtagttcgtaggttttgtttattgattttttagttattttttgaaggaagtagttgtaggtattaagagttttttattgaaaaggacgatgtagaggggcggtgagggattcgttttcgtagggagggcgttttggcggtttttttaggtttttttttattttcgcgttagttttatcgttaggttcgaaatcgattatttttttttgtaggtttgttttgggttgaatataaaaattaagtttttttattatttttttgttgggaggggttgcgattgggaaatttttagaaatttgagggaaaattaaaagggagcgagttttcggtaaaaaattaaattaaaaaggaggggcgttagagaaggaattggtaaagattgttttttaggagaggaattgggtggttggaagaatgaggtgagaaatttttttttttttatttttttagattttaattggttttttttgtatttttttcgtttcgaaaataatttaatttaataagaataatttttaaaggacgtaaattagatatagttataaagtacggggtttggggtttgtggtagttaaaggtgtttttggggatgcgggtatttttttttttttttgtttgaagagtttaattagaaagtttttttttcggttttagatattttttttttttgatttgttttggttgggattagagtttagtttaggtaggttagtgagtgatatttgatggttagaatttttacggttagaattaattttttttgtattttttagtatggaaataaattgtttggttattatgttgttttttttttatttttttttggtggaagtttgataagttattttttatagaaaataatttataggtcgggcgtcgtggtttaaacgtttgtaattttagtattttgggaggttgaggcgggcggattacgaggttaggagttcgagattagtttggttaatatagtgaaattttttttttttattaaaaatataaaaaaattagttgggcgtggtggcgggcgtttgtaattttagttatttcggaggttgaggtaggagaattgtttgaattcgggaggcggaggttgtagtgagttaagatcgtattattgtagtttagcgcgggtaatagtgtgatttcgttttaaaaaaagaaaaaaaaaaagaaaaagaaaaagtattttatagatatagagagaagattaagtagttttttttataatatgaattgagggttagaaatatcgtagggaatagaatttaggttgtatttgagtttgtttttttttaattattttttttttatagttttttttgtatatatatatttgtttttttttatattttttacggatcgtaatttgatggttagttatttttgtaattatatatttaataagagttttgggaaatagtgtttgaatttgaagtaatgattttaatggaaggtaattttaggtttttaggagaattggtgaggatattttggagggtagtattgaagattattgttagtagttttttttttattttttttatttaatatataggttggtgatttttagatattttttagaatgaatttataaaagaattttgaagagttatgtattttttgtttatttttaagttgatatttaaatttttttttattaatttaaatatttatagaggatataattttaaattttgatattttaaattaagatttatattattttttttttttgagacggagtttcgttttgttaattaggttggagtgttgtagtggcgaaattttagtttattgtaatttttttttttaggtttaagtaatttttttgttttagtttttcgagtagttgggattataggtatgcgttattatgtttggttaatttttagtagaaacggggttttatggtgttagttaggatggtttcgattttttgatttcgtgattcgttcgttttggttttttaaagtgttgagattataggtatgagttattatatttggtttatattatttttaatgtatttggtagggtaggtatagtggtttatgtttgtaattttagtattttgggaggttgagataggcggatttcgaggttaggagttcgagattagtttggttaagatggtgaaattttgtttttattaaaaatataaaaattagtcgggtatggtggtgcgtatttgtagttttagttattcgggaggttgaggtaggagaattatttgaattcgggaggcggaggttgtagtgagttgagatcgtgttattgtattttagtttgggttatagagtgagattgttttatattaaaaaaaagtattcggtggattttaagtattttaaaaatttaatgtttattattatttatttaaaaatatatgaataagttttttaatagaaattttatatggttttttttttttttatattttgaattttatttattttttgtaattattagtatataatttattaaattttttttttttattaaatattattaaatattaaatttttttaaatatttttaatatttttatgatttgtgaaatttaaaaagtataatttttattgaaaatgtatttgttaatgagaaatatggtgtttttttttaattagtttaggtatttatggattaatattatttaatggtagaaggagataaggtgtaatattaattttttatttgttttttatttttatagatatgagtattgagaaattttgtttttataattgggaaaggaagagatttgttataatgatattttttgagtttttgaatttttaaattatatgttaataattatagagtgatttattaatattattaaatagagtttttttttaattttgttaaaagtaaaggattagaaattattgaatttttaaaaggatttagttattagagttttagttttggttttattaaatatgattattaattatttgtgatttttatatttagagatattttgttaattagatattgatttttatatttttttgtttatataatattttttggtaaaattttttaattattatatgtttttaagaattttttgttaaattgaaatgtagatttagtttatttattgtatagaaaataattgttatttgtggaattggtaaagttagtttttattttaaattaattagttaaattagatttattttttgttagaaatatgtttgattttatttttttatttaaataaatatgttaatatttattttgaggaatattataaaaattattaggaaataaatgattaattatagtttataaaatggattattgataaattagttaagattaaaattatttagatttattattaatataataaatggtaaaaataagatagtattgttttttattatataattaggaataatgttgtataatgtatagttaaatttattagttttgagaagttatatagaaggtatatatttttttggtaaatgtgtgtgtttgtttttattaaatttttgttgtttagtttttgggaataattaaatgagaattatgtttaaaaattagaaataattaataattttgttatataaattttttttttttgtattttttagaaaggaaagttgtatttgttaagaaataatgaattgagtagttagtaattttattttttattaggaggtagaaaataataaatattttatataagataaaataggaagattgattgtaatgggaatattttgatatgaagtggaaaataattgttttttttaagttttttaggtttttatattttggattatgtattaagatttagtgtaggggagagatattttttttttttgtaaagtaggataaggattatggtgaaagtgggggtagtggtagagtggagaatgtgtatgaatatgttagttggtttttaaatggattggtttttagaatttttttttttttttttttttgagacggagtttcgttttgttatttaggttggagtgtaatggtatgattttagtttattgtaatttttgtttttcgggtttaagcgatttttttgttttagttttttgagtagttgggattataggcgcgtgttattacgttcggttaatttttgtatttttagtagagatggggttttattttgttggttatgttggttttaaatttttgattttgtgatttgtttgttttggttttttaaagtgcggggattataagtatgagttattgtgtttggtcgttttttttgtttttgtttttgttttttgagatgaagttttgtttttgttgtttaggttggagtgtagtggtacgatttcggtttattgttattttcgttttttgggtttaagt

SEQ ID NO: 269 - DNA, 15743 bp, Artificial Sequence
  chemically treated genomic DNA (Homo sapiens)
aaaatttatagttttattattttatagtggaaattgagattaaatatatttttttttttttttttttttttttttttttgagacggagttttattttgttatttaggttggagtgtagtggtatgatttcggtttattgtaatttttgttttttaggtttaagtaatttttttgttttagtttttcgagtagttgggattatgggtgttcgttattacgatgggttaatttttatatttttagtagagatggggttttattatattggttaggttggttttgaatttttgatattgtgattcgtttgttttggatttttaaagtgttggggttataggtatgagttattatgttcgtttataagtaaatttttgatggtgataaagtaatatcgatgtttaaagtttggggttattttttaaaattgagaagttaattaaatgagaaatattgttaaattaattatagtttaaagttaattttttttatgtttaatttcggttaataggtttttttgtatatagttaattaaaatttaattggatatttaaatagattgttatttatttatgtattaattattatgtttgtgttaataaaagaatattaattgtttaagttatatttaaataaggtaaattttaaattgtaattaatttggttatttttgtattatttttattttttgtatgttattttgttttttttgtgtataaattttttttattatgtggttgtgttggattttttttgaggttatttaggttttatagattatttaatttgtaaattattatttgtttaattaaattatgttaaatttaatttttttgaagttattttttttttaaaagtttttaaatgtttttttttatatatatatataagtatatatatatgtatatatatgtgtatatatatatatttttttgtgtgtgtgtgtgtgtgatagtgttttattttgttgtttaggttggagtgtagtggcgcgatttcggtttattgtaatgttcgtttttcgagtttaagtgatttttatgttttagttttttgagtagttgggattataggagcgagttattatgtttggttaattttgtatttttagtagagacggggttttattatgttggttaggttggtttcgaatttttaatattacgtgatttgttcgttttagttttttaaagtgttggaattataggtgtgagttattacgttcggttttaaatttgttttatgataaaaaataagtgatgtgttgtagggttttgattatttaaaataagttatgttttttaaattattttatattagttatgttagttattttttttaaattattttatgtttttttaaaatgtttttgtaattttttttttgtttttttattttgtttgaaatagagttttattttattaattaggttggagtgtagtcgtgtaattaattatggtttaatttagtttttatttttcggttttaaataatttttttgttttagatatttgagtattattatgtttggttaattttttaaattttttttattgagttaggattttattatgttgtttaggttgtatttgaatttttgagtttaaatgatttttttattttagttttttaagttttttaaagtattggaattaaggatttaaggttattatgtgttttagtaatttttcgagattatttttaataataaatagtattttatgggtataaatttataagtaatttggtttttattttagaagtgttattttttagggttttaagagtttagggtagttatttgagtagtgtgatttatggaggtatataggttttgaagttagatagagttgattttgagtttcggtttagttatttagaagttgtgagtgtttggataattttttgatgtggaagagttttatagattatatatgtagaaaaagtagaatggattgggtatggtggtttacgtttgtaattttagtattttgggaagttgaattgggtgaattacgacgttaggagattaagattatttcggttaatatggagaaattttatttttattaaaaatataaaaattagttgggtgtgttggtgtgggtttgtaatattagttatatgggaggttgaggtataagaattatttgaatataggaggtagaggttgtagtgagttaatattatattattgtattttagtttggtgatagaatgagattttattttaaaaaaaaaaaaaaaaaaaaaaaagtagaaggatattgattgtaaatatggtagtaattttttattttttttgtatttatgtatattgataggtgtttttatagttatttttatgaagagttagaatttattttttaaacgtttgatttggttggttttatttgtttatggtagtagaaatttgagaatatgataatgtgttggtttggagtttaggtttaaatagttttgattgtttttgtttttttttttttttttttttttttttttgtttttttttttttttgagaaggagtttttttttgttatttaggttggagtgtagtggtatgattttggtttattgtaatttttattttttagatttaggtaatttttttgatttagttttttgagtagttaggattataggtatatgttattatatttagttaatttttgtatttttagtagaggtgaggtttcgttatgttggttagattcgttttaaatttttgatttaatgtgatttatttgttttggtttattaaagttttggaattataggtatgagttagtatgttcggtttgtttttgttttttttttagaatgttgttatatttatgaaaaaaagtttatattaggttaggtacggtggttggtgtttgtaatcgtagtattttgggaggttaagatggatagattaagaggttaggagatcgagaatattttggttaatatagtgaaatttcgtttttatttaaaatataaaaaaattaatcgggtgtggtggtgggtatttgtagttttagttatttagggggttgaggtatgagaattatttgaatttaggaggtggagtttgtagtgagtagagatcgtattattgtattttagtttgggcgatagaacgagatttcgttttaaaaaaagaaaagaaaaaagtttatattagttaattggagtataagatattatgaagaggagaagtaaggtatttttgttgatagttttagaagtagaagtttatttttataagtatagttgttgtttttttagttaatgagtagtttatgatatatgtttgaaggagtttagttgagaatagaagaatggttttattgagtttagtttaaatggttgagtattttaattatgagtaaattagttttggatggtttattatgttgttatagttaattaatatgtgtatttagtgtagatagaatgttaagatttaataataggttgattattagttattttttaatattgggtattataaaagtattgatatttttttcgatttaaagttagatgttttgtaagataatgttgagaaatgtagaaatatggttaggggtggtggtttatgtttataattttagtattttaggaggttaaggcggttggattatttaaggttaggagtttaagattagtttgattaatatggagaaatttcgtttttattaaaagtataaaaaattagtcgggcgtggtagtgtatgtttgtaattttagttattcgggaggttgaggtaggagaattgtttgaatttaggaggtagaggttgtagtgagttaagattatattattgcgttttagtttgggtaataagagtgaaattttattttaaaaaaaagaaatgtcgaaatatatgtggatatgtatgtatgtgattgtgtttatatttatttagttttttatattatagaagaaaataggtaattatagtttgaatattagagtcgaggttaaatagtaaaataagtttgtttttaatttattttttttttatgtaaatattaaaggttaagattgtgaatagatttgaagatatagtttttttttttttgtggtttattattttttgtttattgtttgatttttgaaagaaagatgggtaataggtggtaagtagtggtttatttgtgatttatttttgttgttattagttttttttatagttattatttgttttattttcggaattgaaaagagacgttgataaatagaggttgtttttttatttgtggtagaaaaggggtgtttaggttttttatttttattgatattatagttgtattttaatgtggtagttattggttatgtgtggtttttgggtgtttggaatgtggttggtttgaattgcgatgtgttagaaaggtaaaatatagaattagttttaaagattttgttttaaatgtatttatattttattaataattatatattgtttatatattaaaatgaaaatattttgaatatattgggttaaataaattgttataattaattttatttgttttttttttttttttaaagtttggttattagaaaatttaaaatttatttgtgatttatattttattttagaggattgtttgtttaaaggattagaatataggaaggttataaaatttaaaattttagaataattgttgttatattttgtttatttgtgaatagttatataatatattatttttgaatgtatataaattgatatataaggtaagggtaaatattttttggtgtgagtttggtttagtttaggaaggaagttttgtttgaaaaggttgtagtttaggttgttattcgttttttttttagtttagtatttgattatattttttgttatttagggtttgaaaagaaggtgttttaaatattatttaattagagacgttgggttgggaatcgtttaattaggaacgtagttggtgcggatagggcggttttcgggatgtggcggggtttttgtttttcgttgtagtttgagttttaggttttgttttttttgttttgtgttttttgttcgtggacgtttagtttttgtggttttgtggtttgtaggtattgggagatttatagttaagacgtcgggattttttggaagtttagaaatggtgagagtgttaggttcgttatttcgagggggaaaggggttggttgaaatcggtgggaagcggttgtggcgggatttaggtttttttgtagttagttttataatttgcgttttagttttttttgtttagttcggttttagtttttttagttataagatggcggttgcgttgatagtcggttcgggcgttttgttttttttttgcgtagtgattgtgttttggattggagttttttttgggtagttttgtattcgtagtatcgcgttttttttagattgagtagggattacgggagggttgttaggggagaattttgattcggggtgcgggtttatgaaagagttttgggttgtggggtttttagtttttttttttttttgttaaaaatgtatggggggacgggcgtggtggtttacgtttgtaattttagtattttgggaagtcgaggcgggcggattatttgaggttaggagtttaagattattttggttaatatggtgaaatttcgttttaatttttaaaaatataaaaattagtcgggcgtcgtggcgcgcgtttgtaattttagttatttaggagtttgaggtaggagaatcgtttgaattcgggaggcggaggttgtagtgagtttatatcgcgttattgtattttagtttgggtaataagagtgaaatttcgttttaaaaaaaaaaaaaaaagatgtataggagttatcgtaaaaatattaaagaatttaaaaagtggtttaagtattgtagagtatttagttatggtttgtagtttgtggtttatgggaggagtttgaataaaagatttttataaggtgtatgataaaaaaattaaattagtaattggttaggtatagttatatagttttttaatttgtacgatcgtgttggtaattttttggttatgtgattagaatttaattggtagtttatagttggttaagtttgaattttgtttttttcgatgtggtaatttattaaaaaatgaaattttagttagatttttttaaaaaggaggattttagggattagagttattttagtttaattgtttgttattgaattatttttatagtttataggggatttttttttttttgtattttttatatatgttttaagtagggttttaagtttattttttattttttgtttttttagattaattttgatttatagtaaaatattaaatttttagtgttattgatatttttaaatgttatttttttttttttgatatatattattaattatttgttttttattgtatattttatattttaattaataatttttttataaaatattggatggtattatttaaaaaattgttttttgtttgtaaatattttttatgagaagaaagtgaataataatttttgatattatattgtaaaaaaatttttgtgttttttttttttttattttttttaggtatagagtttttattagaatattggtgggttaaggttttcgtttggagattttatggtgtgatgggttattagttattttttagtttttttttggttttgggtttttagtattgtatggggataaattaggatgtttattattgtggttatgttggttagagtgtttagtgaatattagtttttgggttatttttttttataggataatttgaggtatgaagtgtattttattaagggagtaggtagatatttagggtttgagtgtagttttttggtgtattttttttttgaaaagttaattttttgagatattaaaattgattttatttagttgggcgcggtggtttatatttgtaattttagtattttgtgaggtcgaggcgggcggatcgcgaggttaggaatttgagattagtatggttaatatggtgaaattttatttttattaaaaatataaaaattagttaggtttggtggtatatatttgtaattttagttattagggaggttgaggtagaagaattatttgaattcgggaggtggaggttgtagtgagttaaggttatgttattgtattttagtttgggtgaaagagcgagattgtatataaaaaaaaaaaaaaaagattgattttatttaatttagtttttattttttggagatatattgagagaaaaatgtagaaataatttttattttttggattttttaagatttgtgaaagaaaaaatagtattttaaaagataaaaaaaaggttattttagtgagatggtgtaagaatttgtaaagtaaaatgtatttggggtagttattggggtatagtgtagtgttttttgagaggttggttattgagaattttagtgagtaggagcgggtgggagaattttttaagtgattgaacggtttgatttgatatataggttagatatattttttttttaattagtattgtttttttgtgggtttgttattttgaaaagatttgtttatttattttgattttagttttttttaattgtaaattgtatttgattagtaaagtttaaaaggtataaaaatatttgtatagggtgtaaaagaagtgggttttagaaaaaaattaaaatttaattatatattttatttgttaagaatttttatttatttgtttttttgttagagtgagtttaaaaatttttttaggtgtgtttatggttgggtgattttaaatagaattttaaggtttagtttttagaatgttattagggaaaaaattaggaaaaattttttttttattttggttgtagaaaataaatagatttttataagaaaatgtggtatataattggtgagttatatagatttatgaaaatataaatttttttttttgtagggtaaagttgtgatagtgaatatttttgttttatattttgttattttgatttttaagttttatgataaattttatgagatgaaatttggtattttttagaagtgtttttatgattaattgtttattatatgattttttatagaaataataaaataatatatttattgtttgaaaggaataaatgtttttgtttttttaattgaggtataaaatgtaagtattaaaaattttttttttttatatgaatattgtgtttgagtgattttattggagtttttagttttaaaaattaagggaataaatttgatatggaaattaaagtttgaatttagtgattttaatttaaggttaatattgagtttataaaaaaaaaagattattaaaggtttagttagttttttttggggagttttttttgtagatgttttagtttgtttattttagttatggaagaagtttttttattttgagagaagttttaaagttttggaaagttggggttttataggtagatgtagttaaggttaagatgaaaggaaattgggagggttttattgatgataaagttttttattgttttgaggtattgtttagattttgtaaaataaaataaagttagatttgtgtaaaaaaaaaaattgaattttaaaggaatattgtaataggaggaagtattaattatattatttttatggtttgtaaagtttaggtagataaaggttttgttttttagggaggagtataaaagattagaaaaaaggtgggaggggagtggtaaatggagtgtgaaaaaaattagattttagattagataatgttttattttgaagttagtatgtttataggagggatataaaatggggttgtatgttgatttatatttagggtagtttaaagtttaggagtttgtgggaaaaaaataaatttaagtttgattaagaagtattttatttttgtgcgtggtggtttatatttgtaattttagtattttgggaggttgagatgggtattttatttgaggttaggagtttgagattagtttgattaatatagagaaattttatttttattaaaaatataaaattagttaggcgtggtggtgtatgtttgtaattttagttatttaggaggcggaggtaggagaattttttgaatttaggaggtggaggttgttgtgagttgttattacgttattgtattttagtttgggtaataagattaaaagtgttttaaaaaaaaaaaagtattttatttagattagtgaagataaatttagtttatttttttaatgagaaaaggaagaaaatgtgtatagtatgtatttggttatgtgataggtaagaaaagggagtgttttttaagttataataagaagggtgtttttggttgggtatggtggtttatatttgtaattttaatattgggaggttgaggcgtgaggattacgaggttaggagtttaagattagtttggttaagatggtgaaattttgtttttattaaaaatataaaaattagttgggcgtggtggtgtgtgtttgtagttttagttatttgggaggttgaggtagaagaatcgtttgaatcggtaggcggaggttgtagtgagtcgagattatgttattatattttattttggcgatagagtaagattttatttgagggggaaaaaaagtgtttttttttataaattgttgttggagtatataaaggatgatttttattaattatagttattttttaggattatgtatgtgttttatttttttttatttttttttttgttttatatattttttttatttgattttttttgggttgtattttttataataaattatagagtttgttgggttttgtgagtagttttattaaattattgaattagagggaggttatgggaatttttaaattttaaatagtagtttagaagtataggtgggtttatggggtttgtgattggtatttgtaatgagggtagtgttgtgggattgaattttgaatcggggtttgtgttgattttgggtggtgttagaatttaaattttagataatgagtaggtgttggagaattgttttgtgtttagtaaattttatagatttgatattagaaaaaagatattatagaggtttggtttcgaatggaattttgggtgtttgggaaggggaggttttgtttttttgtatataggttgttatattgtttattgttttgtgattttaggtttttttttagggtgattgtggattgaaaatttagaggaaaggatttttgatgatagattttttttttttgtagttgttattataggagttttatttatttatatatattagatattgacgtgtttatattttttttaagattagttattatttttaggaattttattatagtattgtggattttagtattttttgttaaaattttataagagtgtttataagttttttggtatattttaatttttagatattgaatttgtagtagtaaattgttttttttattaatttagggttttggattatttgtttataattttatttgtttgtataggtataaataaattagagtatagttttatcgggatcgttgtttgtagtaaaaatttatagtttttttatttatattgtattttattttatttatgaagttttttttttttaatttttgattttggtttaggggtatacgtgtaggttttttatataggtaaaattgtgttacgggggtttggtgtagattatttttttatagaggtattaagtatagtattaaattaatatttatttaaattttttttgttattttattttttatttttattaggttttagtgtttgttgtttttttttttgtgtacgtgtttttatttagtttttattttttttttttttgagatagagttttgttttgttatttaggttggagtatagtgataggatttattagataaaaattgatttttttttttttttttttttgtttgagatatcgttttgttttgttatttaggttggagtgtaatggtatgattttagtttattgtaattttcgttttttaggtttaagtaatttttttgttttagttttttaagtagttgagattataggtgtatattattatatttggttaatttttgtatttttagtagagatagggttttattattttggttaggttggttttaaatttttgattttgtgattttattttagtttttaaaagtgttgggattataggtatgagttattgtatttagtttatttttatttttttaattttgttaagaatatatatgtattttataataaaattattttagaaaattttaaaatatttttttaaattttttagtatatgttataaaattgagggggtagtggtttggtttaaaaagattaagattatataaattttgggatttaagttttttttaggtaagtttaggaaaaatagaattggaaatattttagtggtatagagaatagagttttatatagggttttttttttgttttagttttgtttagatttaatttatttggaggttttatttaggtttggttttattttggagttttgttttatataatttgttagaagaaattaaagttttgggttaggcgtggtggtttacgtttataattttagtattttgggaggttaaagtaggtagattataaggttaggagttcgagattagtttgattaatatggtgaaattttatttttatttaaaaaatataaaaattattttggtatgttggtatgtattcgtaattttagttatttgggaggttgaggtaggagaattttttgagtttaggaggtagaggttatagtgagttgagattatgttattgtattttagtttgggtgatagagtaagatttcgttttaaaaaaaaaaaaaaaaaaaaaagaaattagagtttttgtttggtgaatttttttgtttttttagagtttatgtttataatttttttaaattttaaaatagataaatggtaaaaataaagtatgtattttagggttttaatttttaaattttgtattaaagtgagtgtttgtagaaatattttatttaataatttgttttttatttttgtaaatttagtagttgttttgtaagttatataaaattaaatataaatatagtaaaaaatttttttaaaatatattaaatttttttttttgtattttttttatttgtttatatttagttttttttttatgtaattaaaaaaaattaatgatagagaaataagaagaaatggaaaggtagggttttttatttaaattttaagaattattaaatatttaataatattttttagggtgttatgatgatgaaattacgtaatgtgttatggttaatatagtgttttttaatatttttttgagtatatagtttttgtttaatatattttgtattagtataggtgtatatgttgttgttaaatgtaggtttatttaaatattgttgttttttgttttttttgtaaattttaatgagttagtaaagaatatgatatttaaggatggagatggattttatttatttatttagagatagagtttcgtttttgttgtttagattggagtgtaatggtacgattttggtttattataatttttgttttttaggtttaaatgatttttttgttttagtttttttagtagttgggattatagatatgtattattatatttagttaatttttttgtatttttagtagagattgcgtttttttatgttggttaggttggttttaaattttcgatttttggtgatttatttgtttcggttttttaaagtgttgaaattatatgtatgagttattgcgtttggtagagatgggttgtttttatttgtattagaagtatttggttgtgataagagtgttgagtgtaagggaatttgtgttgtgtttgttttttttaatgttaataatgagtttaagggaagtaatattagtattgatagggttgttatttatttatggattttttttaaatttgtagaattatattatatagaatggagttaaaattattaagtgatttataagtttattaaaatttgagaggtaatgtttagttaagtggttattagtttaggttttttattaggattttatggttaatttgtagaaatttttttatttgtgttttttttatagattttgtttattgttttagggggaagtagttatgttgtagtaatgaagtgttttatgtgatttttaagttgaggttagaattaagtatgaggtgttttagatatatttatgagttaagttttatttttgtattaaagggtggtcgtaggattgtttttgtttggatttggtagggatagagtaatgtggttatattttttttttttttttttttttttttttttttttttttttttgaggtgtagttttattggagtgtagtggtgtaatttcggtttattgtaatttttgtttgttgggtttaagcgatttttttgttttagtttttcgagtagttgggattataggtatatgttattacgtttggttaattttttttatttttagtagagatgttgttttatcgtgttagttaggatggttttaattttttgattttaggatttgtttgtttcggttttttaaagtattgggattataggcgtgagttattaagttcggttatggtttatatttttattattgtagtagaaattgttggtgtttgtgataggggagggtatttgagaataggaaaagtgaaatatattttgatatttatggagtagtttattgtttttgaattttttttattataaaggatataaatgagtgagttttttttgtaggttttgatttttttgtttgtgggtttggtggtagtagatgagtagttgatgttgatatttttaaagatatatttttaatatgtagttgtaatttgtttaaagaattttatttggaaaggatttttagaaaaggaggaaaaagaggaaaaaaatggtttttttttttaaagtaaaatatgttttagattaagagttgtgtttattttgttttttagaatgttatgtaaattattatttttttattgtattatttttttttaaagagtttaattatttgtaaaaatttttatgatagttaagggtgtttgaaaagtattttttttttatatattagagttttttttatattttttatattgtggttttttatatgttatgtagaatttttattataaatttataatttgtattattaaaaatgttttttttgtggtttttgaatatgaaaaggtgtggatatttaagatttttattgggggaaagttggagttatttgtaaagatggaaaatatgtaatgttgaggttttatttgtattttttattatttttgtgtaaaataggattaaggaaatgtttagttaaataagatgatatttattatttagaaagttttaaaaaaaaaattattaggagatatttgttttttagggtgttaaagaaagatgatttaaaattattattataaattatagatagggaagatatttgtattttgaattttgtataaaattgattttttaatgttaaaatttagattatagtttggaggagtagtattatagtcgtgatgttgtgttattttatgtgtattaatatattataaaaatatgttttaggatgggcgcggtggtttagtttgtaattttagtattttgggaggttaaggtaggtagattataaggttaggagatttagattattttgggaatggtgaaatttcgtttttattaaaaatataaaaaaaaaaaaaattagtcgggtatggtggtgggtatttgtggttttagttatttgggaggttgaggcgggagaatgtcgtgaatttaggaggcggagtttgtagtgagttgagattgtattattgtattttagtttgggtagtagagcgagatttcgttttaaaaaaaaaaaaaaaaaaaatttgttttagtgtagtttatgttaatgatttatttggttaaagagttttttgatagattttgttattatagagataattattttttttttattattattttaatgtagttaatgtgtataaattattatagttaatttagtagttgttttttttttttagttttttttttttgtatatatttgtttttggaaagttaaagtttttatttttgtttataggttagaaaaattaggaaaaatataggtttttttttttattggatgtttgataaaatattttttttggttaaaaatattaattttattggtgagtttgttagaaatttagataattagattttattttagattatttgaaaaaataatttgtattaataagttttttagtttattgtatatattaaaatttaaaaagtattttttaatttaatttgttttttttatttgaaaaatatatataatttattttgtagaatgtgtatatggtatttaaaaatatatatttttatgtttttaattttatattatattatttagaaaagtattatgtatatattggtattgtggattttatgttattttttttttttagagttaaaaaatatattagagaatatttttgtgttaaaaaaattattttattttataattttagttatttttgtaagttagaaatagttatttgtatttttttattttattttgagtaaaattaaaaatgttttttataattagttggtaattatgtgtgtgtgtgtgtgtgtgtgtgtgtgtgtgtgtgtgtgtatgtgtatgtgtgtgtattttttagg

SEQ ID NO: 270 - DNA, 15743 bp, Artificial Sequence
  chemically treated genomic DNA (Homo sapiens)
tttgaaagatatatatatatatatatatatatatatatatatatatatatatatatatatatatatataattattaattggttatgaaaagtatttttaattttatttaaggtgaaatgagagagtataggtaattgtttttgatttataggagtgattaaaattataaaataaaataatttttttaatatagaaatattttttaatatattttttaattttaagaaaagagagtggtataagatttataatattagtgtatatatgatatttttttggatgatatagtataaaattaagggtataaaaatgtgtatttttggatgttatatatatattttatagaatgagttgtgtatattttttagatggaaaagataggttgagttagaaggtattttttaaattttaatgtgtataataaattggagaatttgttaatgtagattatttttttagatgatttggaataaagtttgattgtttgaatttttaataagtttattagtaaggttaatgtttttggttaagaagaatattttgttaaatatttagtaaggggaagaatttgtgttttttttaatttttttggtttgtaaataaagataagagttttgattttttaaagatagatgtatgtaaaaaaaaaaaattaagaaaaaagggtagttgttggattaattgtgatggtttatgtatattagttgtattaagataataatgaagaaaaaataattatttttatagtgataaaatttgttagagagttttttaattaagtgaattattaatatgaattgtattaggataaattttttttttttttttttttgagacggagtttcgttttgttgtttaggttggagtgtagtggtgtaattttagtttattgtaagtttcgttttttgggtttacggtattttttcgttttagttttttaagtagttggggttataggtgtttattattatgttcggttaattttttttttttttgtatttttagtagagacggggttttattatttttaggatggtttagattttttgattttgtgatttgtttgttttagttttttaaagtgttgggattataggttgagttatcgcgtttattttaggatatatttttatgatgtgttgatgtatatgaaatgatatagtattacggttgtgatattgtttttttaaattatagtttgaattttaatattaaaaaattagttttatgtaaagtttaggatatagatattttttttgtttataatttgtaatagtaattttaaattatttttttttagtattttagagagtaggtattttttgataattttttttttagaattttttgggtaataaatgttattttgtttaattaagtatttttttgattttgttttgtatagaggtaatggagaatatagatggaattttaatattatatgttttttatttttataaatgattttagtttttttttaatagaaattttgagtatttatatttttttatgtttaagagttataaagggaatatttttaatagtgtagattataaatttgtggtaggaattttgtatggtatataaaaagttataatgtaaagaatgtagaaagggttttggtatatagaaaaaaaatattttttagatatttttgattattataagaatttttataagtagttaaattttttagggaggggtaatataatagagaagtaatgatttgtatggtattttaggaggtaaagtggatatagtttttgatttgagatatgttttgttttaaaaaaagaagttatttttttttttttttttttttttttttgggaattttttttagatgagattttttgaataaattatagttgtatgttgagaatatgtttttaaagatgttaatattaattgtttatttgttattattagatttataggtagaaggattaagatttgtagaaaaagtttatttatttatgttttttataatggaagagatttaggaataatgagttgttttatgggtattaaaatatgttttattttttttgtttttaggtgtttttttttgttatagatattagtaatttttgttataataatgaaaatatgggttatggtcgggtttggtggtttacgtttataattttagtattttgggaggtcgaggtaggtagattttgaggttagaagattgagattattttggttaatacgatgaaatagtatttttattaaaaatagaaaaaattagttaggcgtggtggtatgtgtttgtagttttaattattcgggaggttgaagtaagagaatcgtttgaatttagtaggtagaggttgtagtaagtcgagattgtattattgtattttagtgaaattgtattttaaaaaaaaaaaaaaaaaaagaaaaagaaaaagaaaaagaaaatatggttatattgttttgtttttattaaatttaaatagaaatagttttgcggttattttttagtgtaaaggtggaatttaatttatgaatgtatttggaatattttatatttgattttggttttaatttaagagttatatgaggtattttattattataatatgattgtttttttttagaataataaatagaatttgtggaaagggtataagtaaagagatttttgtaaattggttatggaattttaatgagaagtttgggttgataattatttagttaagtattgttttttaagttttaatgagtttataaattatttggtaattttggttttattttatgtaatatgattttgtaggtttgaaaagagtttatgaataggtaataattttgttagtgttgatgttgttttttttgggtttattattggtattagagaaagtaggtatagtataggtttttttatatttagtatttttgttataattaaatatttttggtataaataaagataatttatttttgttaggcgtagtggtttatgtatgtaattttagtattttgggaggtcgaggtaggtggattattagaggtcgggagtttgagattagtttgattaatatggagaaacgtagtttttattaaaaatataaaaaaattagttgggtgtggtggtgtatgtttgtaattttagttattagggaggttgaggtaggagaattatttgaatttgggaggtagaggttgtggtgggttaagatcgtgttattgtattttagtttgggtagtaagagcgaaattttgtttttaaataaataaataaaatttatttttatttttaagtattatattttttgttggtttattaaagtttatagaggaaatagaaggtagtaatgtttgaataagtttgtatttggtaataatatgtatatttgtattaatgtaagatatattaagtaggaattatgtatttaaaaggatgttaaaaagtattgtgttggttataatatattacgtgattttattattataatattttgaaagatgttattaagtgtttaataatttttaggatttaaataaagagttttgtttttttatttttttttgtttttttgttattgattttttttaattgtatagaagaaaagttaaatatagatagatgagaggaatatagaaaggaaagtttaatgtattttagagaagttttttattgtgtttgtatttaattttatgtgatttgtagagtaattattggatttgtaaaaatagaaaataagttgttaaatagaatgtttttgtaagtatttattttaatataaaatttaaaaattaagattttaaaatatatattttatttttattatttatttgttttggggtttaaggaaattgtgagtatgaattttagaaaggtagaaggatttattagataaaaattttgattttttttttttttttttttttttttgggacggagttttgttttgttatttaggttggagtgtaatggtatgattttagtttattgtaatttttgttttttgggtttaagagatttttttgttttagttttttaagtaattgggattacgggtgtatgttaatatattagggtaatttttgtattttttaagtagggatggggttttattatgttggttaggttggtttcgaatttttgattttatgatttgtttgttttggttttttaaagtgttgggattataggcgtaagttattacgtttggtttaaaattttgattttttttaataaattgtgtgaggtaagattttagggtggggttagatttaaataaggtttttaaataggttaaatttaaatagaattggggtagggagaggattttatgtagaattttgttttttatgttattagggtatttttagttttgttttttttaagtttatttaagagaaatttaaattttagagtttgtgtaattttaatttttttaagttaagttattgtttttttaattttataatatatattaagaaatttaaagaaatattttaaggttttttagggtaattttattataagatatatatgtatttttagtaaggttaaagaaatagaaataggttgggtgtagtggtttatgtttgtaattttagtatttttggaggttgaggtgggattataaggttaggagtttgagattaatttggttaagatggtgaagttttgtttttattaaaaatataaaaattagttaggtgtggtggtgtgtatttgtagttttagttatttgggaggttgaggtagaagaattgtttgaatttgggaggcggaggttgtagtaagttgagattatgttattgtattttagtttgggtgatagagtaagacggtgttttaaataaaaaaaaaaaaaagaagagattagtttttgtttagtgaattttgttattgtattttagtttgggtgatagagtaagattttattttaaaaaaaaaaaaagtaagagttaaataagaatacgtatataaagaaagaaataatagatattgaggtttagtaagggtggagggtgagatgataaggagaatttgaataaatattggtttggtgttatgtttagtatttttgtgagaaaataatttatattaaattttcgtgatataattttatttatataagaaatttgtacgtgtatttttgaattaaaattaaaagttaaaagaaaaaaattttatgggtggggtaaagtgtaatgtaggtggaaggattgtaggtttttgttatagatagcggtttcggtggggttgtattttgatttatttgtgtttgtgtaggtagatgagattatgaataggtggtttagaattttaggttggtggagaaaatagtttgttgttgtagatttagtgtttgggggttgggatatgttaggagatttgtagatatttttgtgggattttggtaagaaatattaggatttataatgttgtggtgaaatttttgaggatgatgattagttttgagagggatgtggatacgttaatgtttagtgtgtgtgagtgggtgggatttttgtggtggtagttgtaagaaaagggggtttgttattagaggtttttttttttaagtttttagtttatagttattttgggaggagatttggaattataagataatgggtagtgtgatagtttgtgtataggagagtagagttttttttttttagatatttagagttttattcgaggttaggtttttgtgatattttttttttggtattaaatttatagagtttgttgaatataaagtaattttttagtatttatttattatttgaaatttgaattttgatattatttagagttagtatagatttcgatttagggtttagttttataatattgtttttattatagatgttagttataaattttataggtttatttatgtttttgagttattgtttaaaatttggggatttttataatttttttttagtttaataatttgatagagttatttatagaatttagtaaattttgtagtttattataaaagatataatttagaagaagttaaatgaaagaaatgtataggataaaaaaagaggtggggaaaaatgaaatatatatataattttggaaaatagttgtgattaataaaagttattttttgtgtgttttagtaatagtttatgaaaagaaatatttttttttttttttagatggagttttgttttgtcgttagggtggagtgtagtggtatgatttcggtttattgtaattttcgtttgtcggtttaagcgatttttttgttttagttttttaagtagttgggattataggtatatattattacgtttagttaatttttgtatttttagtagagatagggttttattattttggttaggttggttttgaatttttgatttcgtgatttttacgttttagttttttagtgttgggattataggtgtgagttattatgtttagttaaaaatattttttttattatgatttagaagatattttttttttttatttattatatagttagatatatattgtatatattttttttttttttttattaaaaaaatgagttgaatttgtttttattggtttaaataaaatatttttttttttttgagatatttttgattttgttgtttaggttagagtgtaatggcgtgataatagtttataataatttttattttttggatttaagggatttttttgttttcgttttttgagtagttgggattataggtatgtattattacgtttggttaattttgtatttttagtagagatggggtttttttgtgttggttaggttggttttaaatttttgattttaggtgaaatgtttattttagttttttaaagtgttgggattataggtgtgagttattacgtatagaaataaaatattttttaattaaatttaagtttattttttttttataggtttttgaattttgagttattttgagtgtgagttaatatataattttattttatgttttttttatgaatatgttgattttagggtaaaatattatttgatttaaaatttgattttttttatattttatttgttattttttttttattttttttttaattttttatgtttttttttaggaaataaagtttttgtttgtttaaattttgtaagttataaagatgatatagttggtatttttttttgttgtaatatttttttggaatttaatttttttttttatataaatttaattttgttttattttataaagtttagatagtgttttaaaataataaaaaattttattattagtgagatttttttagtttttttttattttaattttaattgtatttgtttgtggggttttagttttttaaggttttggagttttttttaggatggaaagattttttttatggttggggtgagtaggttgggatatttgtaggggaggttttttagaaagaattaattgggtttttaataattttttttttttgtaggtttaatattagttttaggttggagttattgggtttaagttttaatttttatgttagatttatttttttggtttttgaaattgaaaattttaatgaaattatttaaatatagtgtttatataaaaaaagaaaatttttggtgtttatattttatattttaattagaaaagtaaaagtatttattttttttagataataaatgtattattttattatttttataaaaaattatgtagtaaataattagttatgggaatatttttaggaggtattaagttttattttataaaatttattatgaaatttaaaaattaagataataggatatgggatagaaatatttattgttataattttattttgtaaaaagagaaatttgtgtttttatgaatttatgtaatttattaattatatattatatttttttgtggaaatttatttattttttatagttaaaatggaagagagattttttttaattttttttttgataatattttaaaagttaagttttggaattttgtttaaaattatttagttataagtatatttgagaaaatttttaaatttattttgataaaggaataagtaaatgagaatttttaataaatggaatatatgattagattttaatttttttttaaaatttattttttttatattttgtgtaaatatttttgtgttttttaaattttattaattaaatgtaatttataattaaaagaagttgaagttaaaataagtgaataaatttttttaaggtgataaatttatagagggatagtgttgattagaaaagagatgtgtttgatttatgtgttaagttaggtcgtttaattatttgaaagatttttttattcgtttttgtttattaaagtttttaatgattaattttttaagagatattatattatgttttagtgattgttttaagtgtattttattttgtaagtttttgtattattttattggggtgattttttttttgttttttgggatattatttttttttttataaattttagagaatttagggggtaaaaattatttttgtattttttttttaatgtgtttttaagaaatagaagttgggttgggtgaagttaattttttttttttttttttgtatatagtttcgtttttttatttaggttagagtgtagtggtatgattttggtttattgtaatttttatttttcgggtttaagtaatttttttgttttagtttttttagtagttgggattataggtgtgtgttattaggtttggttaatttttgtatttttagtagagatggggttttattatattggttatgttggttttaaatttttgatttcgcgattcgttcgtttcggttttataaagtgttgggattataggtgtgagttatcgcgtttagttgggtgaagttaattttaatgttttaaggagttagttttttaaaggaagagtatattaggagattgtatttagattttgggtatttatttgtttttttgataggatatattttatattttaggttgttttatgagagaaaatgatttaggagttgatatttattagatattttagttaatatagttataatggtgggtattttggtttatttttatatagtattgaaaatttaggattaggaaaaaattgaagagtggttgatgatttattatattataaagtttttaaacggaaattttgatttattaatattttgataagaattttgtgtttagggaagataaaaggaaaagagatatagagatttttttataatatggtgttagggattattatttattttttttttatgggaaatatttataaatagaagataattttttaaatagtgttatttaatgttttgtggaagaattattaattgaaatataaaatgtataataaaggataaataattgataatgtgtattagagaggggaaggtggtatttgggaatgttaatgatattggaaatttagtattttattgtaaattagagttaatttggaagaatagggagtaagaagtagatttgagattttgtttgagatatatgtgaaaaatgtaggggaaaagaagttttttgtggattgtgaaaatgatttagtggtaggtaattagattgaggtggttttagtttttggggtttttttttttaaaaaaatttaattaaaattttattttttagtaaattattatatcggggaaaataaaatttaggtttaattaattataaattgttaattaaattttgattatataattagaaaattgttaatacgatcgtataaattaagagattatataattgtatttaattaattattaatttgatttttttattatgtattttataaaagttttttatttaagttttttttatggattataaattataaattatagttgagtgttttataatatttgaattattttttaagttttttaatatttttgcggtgatttttatatattttttttttttttttttgagacggagttttatttttattgtttaggttggagtgtagtggcgcgatgtaggtttattgtaattttcgtttttcgggtttaagcgatttttttgttttaaatttttgagtagttgggattgtaggcgcgcgttacgacgttcggttaatttttgtatttttaaaaattgagacggggttttattatgttggttaggatggttttgaatttttgattttagatgattcgttcgtttcggttttttaaagtgttgaaattataggcgtgagttattacgttcgtttttttatatatttttaatagaaaaaaagaggaattgggaattttatagtttaaagtttttttatgaattcgtatttcgagttaggatttttttttgataattttttcgtggtttttgtttaatttgggagagacgcggtgttgcgaatgtagagttgtttagagagggttttagtttagggtatagttattgcgtagggaagagataggacgttcgggtcggttgttagcgtagtcgttattttatggttggaggaattggggtcgagttgggtaaaaagaattggagcgtagattgtggagttgattatagggaggtttgagtttcgttatagtcgttttttatcggttttaattaatttttttttttttcgggatggcggatttggtatttttattatttttaggtttttagggggtttcggcgttttagttgtggattttttaatatttgtaggttatagggttatagaggttgggcgtttacgagtagaaaatataaagtagggaaaataagatttagagtttaggttgtagcgagagataaaggtttcgttatatttcggaagtcgttttattcgtattagttgcgtttttgattggacggtttttagtttagcgtttttgattggatgatatttaaggtattttttttttaggttttgagtgatagaagatgtgattagatgttgggttgaaagaagagcgagtgatagtttaggttgtagtttttttagatagggttttttttttgagttgagttaggtttatattagagagtatttgtttttattttgtgtattaatttatatgtatttaaaaataatatattatatggttatttataaatgaataaagtataataataattgttttaaaattttagattttatgatttttttgtattttggttttttgaataggtaattttttgaaataaaatgtgagttataggtgaattttaaattttttagtagttaaattttaaaaagaaagaagaaataagtggaattgattgtagtaatttatttaatttaatatatttaaaatatttttattttaatatgtgagtaatatgtaattattaatgaaatataaatatatttgaaataaaatttttgaaattaattttgtattttatttttttagtatatcgtagtttagattagttatattttaggtatttaggagttatatatggttaatagttgttatattgaagtatagttgtgatgttagtgggggtggagggtttgaatattttttttttgttataggtgaggggatagtttttatttattaacgtttttttttagtttcgagggtgaaataaatagtggttatagaaaaagttgatggtagtaggaataaattataggtaaattattgtttattatttgttgtttattttttttttagagattagatagtgagtaaaggatgatgggttataggagaaaaaaaattatgtttttagatttgtttatagttttgatttttaatgtttatataggaagaaaatagattaaaggtaaatttattttgttatttgatttcgattttaatgtttaggttgtggttatttgtttttttttgtggtgtgggaaattgagtgaatataagtataattatatgtatatatgtttatatgtatttcggtattttttttttttgagatggagttttatttttgttgtttaggttaaagcgtaatggtgtggttttggtttattgtaatttttgttttttgggtttaagtaatttttttattttagtttttcgagtagttgggattataggtatgtattattacgttcggttaattttttgtatttttagtagagacgggatttttttatgttggttaggttggttttgaatttttgattttaggtgatttaatcgttttggttttttaaagtgttgggattataggtataagttattatttttggttatatttttgtattttttaatattattttataagatatttaattttaaatcgggaaaaatattagtatttttatggtgtttaatgttagaaggtaattagtaattaatttgttattaaattttggtattttatttgtattgggtgtatatattagttaattatggtagtataatgaattatttaaaattgatttgtttataattgaaatgtttagttatttaggttgggtttagtggggttatttttttgtttttagttgagtttttttagatatgtattatgagttgtttattgattaggaaagtagtagttgtgtttgtagaggtgagtttttgtttttgggattgttaatagggatattttattttttttttttatagtattttatattttagttggttaatatgggttttttttttttttttttttgagacggagtttcgttttgtcgtttaggttggagtgtagtggtgcgatttttgtttattgtaagttttattttttaggtttaagtgatttttatgttttagttttttgagtagttgggattataggtgtttattattatattcggttaatttttttgtattttgagtagagacggggttttattgtgttagttaggatgttttcgattttttgattttttgatttgtttattttggttttttaaagtgttgcgattataggtattagttatcgtgtttggtttaatatgggtttttttttatgaatatggtagtattttgaaagaaaaatagaagtaggtcggatatgttggtttatgtttgtaattttagaattttagtaggttaagataggtggattatattaggttagaagtttgaaacgagtttggttaatatggcgagattttatttttattaaaaatataaaaattagttgggtgtggtagtatatatttgtagttttagttatttagaaggttgagttaggagaattgtttgaatttgggaggtggaggttgtagtgagttaagattatgttattgtattttagtttggatgatagagaaagatttttttttaaaaaaagaaaaaaatagagaaaagaaaaggaaagaaaagaaaagtagaagtagttaaaattgtttgagtttaggttttaaattaatatattgttatgtttttaggtttttattgttatgagtaaataaggttagttagattaagcgtttggaaaatagattttgattttttatgggaatggttgtaaaagtatttgttaatgtatatggatataggagggatgaaaaattgttattatatttgtaattagtatttttttgtttttttttttttttttttttttttgagatggagttttattttgttattaggttggagtgtagtggtgtgatattggtttattgtaatttttgttttttgtgtttaagtgatttttgtgttttagttttttatgtagttggtattataggtttatattaatatatttagttaatttttgtatttttagtagagatggggtttttttatgttggtcgggatggttttgattttttgacgtcgtgatttatttaatttagttttttaaagtgttggggttataggcgtgagttattatgtttagtttattttgttttttttgtatatgtagtttgtagaatttttttatattaagaaattgtttaaatatttatagtttttaagtggttgggtcgggatttaggattaattttgtttgattttaaagtttatgtatttttatggattatattatttaagtagttgttttagatttttaaaattttggagagtgatatttttaaaataaaaattagattgtttgtagatttgtgtttataaagtattatttattattggaaataatttcgagaaattattgaagtatatggtggttttaaatttttaattttaatattttgggaggtttgggaggttgagatgggagaattatttaagtttaggagtttaagtgtagtttgggtaatataataagattttggtttaataaaagaaatttaaaaaattaattaggtatgatgatatttaggtgtttagggtaggaggattgtttaagatcggaaggtggaagttggattaagttatgattgattatacgattatattttagtttggttgatagagtgagattttattttaaataaaatgaaaaaataaaaaagaaattgtaaaagtattttgaaagaatatagaataatttggaaaaaatagttgatatagttgatatagagtaatttggaaaatataatttattttagataattaaagttttataatatattatttattttttattatagaataaatttgaggtcgggcgtggtggtttatatttgtaattttagtattttgggaggttgaggcgggtagattacgtgatgttgggagttcgagattagtttgattaatatggtaaaatttcgtttttattgaaaatataaaattagttaagtatggtggttcgtttttgtaattttagttatttaggaggttgaggtatgagaattatttgaattcgggaggcggatattgtagtgagtcgagatcgcgttattgtattttagtttgggtaatagagtgagatattgttatatatatatatatataaaaaaatatatatatatatatatatatatatatgtatatatatttgtatatatatatgaaagaaaatatttgaaaatttttaaaagaaaaataattttagagaaattaaatttaatatagtttaattaagtaaataataatttgtaaattaagtagtttgtgggatttgagtagttttagagagaatttagtatagttatatggtaaaaaagatttatgtataggaaaagtaaagtgatatatagaaaatagaagtggtatagaaataattagattaattatagtttgggatttgttttatttgaatatggtttgaatagttgatgtttttttattggtataaatatagtggttggtatatgaataggtaataatttatttagatatttagttaggttttagttaattatgtatagaaaaatttattgatcgaaattaaatataaaaggggttaattttaggttataattaatttaataatattttttatttggttagttttttaattttgagaaataattttaaattttagatatcgatattattttgttattattaaaaatttatttatggacgggtatggtggtttatgtttgtaattttagtattttgggagtttaaggtaggcggattataatgttaggagtttaagattagtttggttaatatggtgaaattttatttttattaaaaatatgaaaattagtttatcgtggtggcgggtatttatagttttagttattcgggaggttgaggtaggagaattgtttgaatttgagaggtagaggttgtagtgagtcgagattatgttattgtattttagtttgggtgatagagtgagatttcgttttaaaaaaaggaaagaaaagaaaagaaaaaagatgtatttagttttaatttttattgtaaaatagtagaattgtgggtttt

SEQ ID NO: 271 - DNA, 5986 bp, Artificial Sequence
  chemically treated genomic DNA (Homo sapiens)
gagagggaagagtgtggttaggtggtttcgagggagttttttggagtcgggtgagtagggtttgtttgtttttgttttgttttatttgtggttcgtgggttagtagcgtgggtattatttaggagtttatataaaaatgtagaattttagtttttattttagattattgagttagaatttgaattttaagaagatttttagggggatttttattgtgtgtatatgatcgaggaattttggttaatatagtttgtttattgtataagtatggtttagggttaggttttgatattttagaatttttggttttttttattggtttgaaggatgttatttatttatgttttggttaagtgtttttttttttttttttataagtgttaattttatttgtagattttaaggttaacgggtttatagcggttgggcgtagtggtttacgtttgtaattttagtattttggaaggttgaggcgggtagattacgaggttaggagatcgagattattttggttaatatggtgaaatttcgtttttattaaaaaaaaaaatataaaaaaattagttagggattaatgaaatgtttattaaatgatttgttagtgttttaaagtttttttattattagttagtattttttatattattattttagggagttaatagaattttataggagtaggttttagtaagtattgggaggttagtagtattgtttaagtatatgggttgtttgtgtttgaagtttgatttgttatttgtttattttttgatttgagtagattatttaaattttttcgatttgtttttttatggggataatataagtatttttagggggtttgtgaaaatttataaagaggttaaaaatattgtttggtatatagtaagtatttaataagaataagaaataatatttgtatagtaattatgttagaaattgttataagagttgtatatatattaataattagttattattagtattattaatttttagtttaggatttagtttagtaaattttttgttttagaagtaaatacgagaggtgaaaatattaatttattttttttagttttagttatatattttttaagttaagttatagagtataatttttttgttggtagggataagatatgggtttatatgatattatttatttttttaatttaatagtatgtattatgtagttgggtatttaagtagaaattaagagttggtaggtattgtttaattggtatttattttaggaataatgttgaattatagtattttatttggtttttttttaggatatttaatgttaattttttgtatttttagtagagacgggattttattttgttagttaggatggtttcgattttttgattttatgatttatttgtttcggttttttaaagtgttgggattataggcgtgatttatcgtgttcggattttttttttttttttttttttgagatagagtttttttttgttgtgtaggttggagtgtagtggtttaattttttgtttttaggtgtaagcgatttttttgttttagttttttaagtagttgggattataggtgtttattattatattcggttaatttttgtgttattagtagagataagtttttattatgttgtttaggttgtttttaaatttttgattttaggtgatttatttatttcggttttttaagtgttgggaagttgtttttttttttttttttttttttgagattgagttttgtttcgttatttaggttggagtgtagtggcgtgatttcggtttattgtaagttttgttttttaggtttaaacgatttttttgttttaatttttcgagtagtttggattataggttttcgttattacgattagttaattttttgtatttttagtagataggattttatcgtgttagttaggatggttttgattagttgatttcgtgattcgttcgtttcggttttttaaagtgttggattataggcgtgagttatcgaatttagtcgatatttaatatttttttatggtttttgttattttgtaagttttttaagggtaaattttgtgttttaagtagttatttttgtaatttttgtaatgttgagtatgagattgaatattggaggagaggaggggaataaaatatttttagggaagaggaatgtaatgggagtttttttaagttttattggtagtttattttttgagtgagtttttttttatttttaaatatttttagtaaaataggtatattaaagggtatatttaggtaatataagttattgtagttaaattttattatatattttttttggcgttttacgattagtttggttttattaataatagtcgttataggaagttgtatgttaggtagaaagagttattagttgttattattttattgttaagaagtaaagatattgtttttattttttttatttaagttttttaaaatttatagaatattatgtttagtatttttattttatatttatttttattttttatagttgttgaaatttttgttttaatattaggaatattttatttttgggtttataatgaatagtaaatattttatatagtattatggttggaatggtaaataaaaataagttagaaaatattaatttttggttatatggtaattttaatttgtttttttggtgtggtgtggacgtatttaggttggattttatatatagttttttgtattatattgatttattgttagagtttacgaagttattatttaagtgtttgattgttatattatatattattttaagatattatgaaggttaattagattataaaggggaaattataaagttgagtaagttttttggtaataaaattatataaatataaaatattgttttttattggtagataatatatcgtgttttagtataatatataagttgttaggtatttatttaatttgattgggaatgggttaaatttggttaaaaaattttattttaggttgttttaattaaaaaaatgtttaaggttgagtgtagtggtttatatttgtaattttagtattttgggggtattgggtgtagtggtttatatttgtaattttagtattttggtttagtatcgtttgaggttaggagtttaagtttagtttggttaatatgatgaaattttatttttattaaaaatataaaaattagttaggcgtggtggtgggcgtttgtagttttagttatttaggaggttgaggtagaattggttaaatatgggaagcggaggttgtagtgagttgagatagtattttagtttgggtaatagagggagattttgttttaaaaaatagtaataaataaatttaaaaagttcggttaggcgcggtggtttatgtttgtaattttagtgttttgggaggacgattattattttgggtgggcggattatttgaggtcgggagtttgagattagtttgattaatatggagaaatttcgtttatattaaaaatataaaattagtcgggcgtggtggcgtatgtttataattttagttattggggaggttgaggtaggagaattatttgaatttaggaggcggaggttgtagtgagttgagatcgtgttattgtattttagtttgggtaacggagtgagatttcgtttttaaaaaaaaaaaaaagtttaaaatattattggtttttaaagttatatatttattttttgataattgttatgttgaacgtaattttttaattgttttataatgattaagtattaatgatttgaatttaggtttaaagtttgatttttaatatatgtgttttgtttttttacgaatatgattttaaaaattatagtttcgggatttgggattggtggtttatgtttgtaaatttagcgatagagtaagattttatttttaaaaaaaaaaaaaattaaagaaaaaaagaaaaataaattatagtgttgaattggtaggttttattgagacgaaatttgggattttttttttttttttgtttcgaataaagttattttagaatgagataaaattttaaaatattttatagttaatagtttaaattgggtttaattttgataagattatttagggttatatatataaattttttttggagaaaatattataattaaattgaagtttatttttgaatatgatagattaggttaaatggttatttttgttttttcgggggatgttatttataaacgtgttaaaagttatagtttaggttttattattttatatgtttatgatttttttagggaggtttttcgtttttattaggtatttttattttgggaagatatattagttttggcggagaaagtagtaaggttttttttcggtttataaaaattaatataaattttagaggttgtattttatagtcgtgattatcgtgatttggtatttttttttttgtaaatttaaatgttatttagaaatcgggtttggttttgaaagttaagggtttggtaggagttcgagaaaggggagaaattttttgcggttttaagttaatggtagttattgtatcgagattcgttttttggtatttttttgttttagttggttaagatagattattaaggttagttagatttttatttagtttggtcgggttcggatttagttgggaatgaatcgagaagtatcgggattcggatttcggcgtgaaaggtcgcgcgcggggtacggcgggaaaagacgttgcgcgtagaaatattcgtttcgcgtcgcgttttagtgggcggttttgtcgcgggcggttttgattggattgtcgaatttcgcgcgttgattggtcgcgtgggcgaggcggaggagagtcgtgcgtagcggcgtatgtggggtcgtgtgtagattcgcgtgtggcgtaggtaaggatttttaaaataaatagtttttattttgcgagtcgttttttttaggtttgcgttcgagttttcgtcgttgcgggttcgtttcgacgcggaaggtgagggttgggggaggggttcggcgttgacggagtcgtagtgcgggtcgggtttgtggcggatagagagggtagggagcggcgaggtggcgatggcggtcgtattttggtttgcgtttttgttgcgttaggcgggaagttcggttgttgtcgtcgtttcggattcgggtttttggcgtatcgttgtcggacgatatttttgtttttttttcgttttggaaagttgggtcgtcgagtatgcgggtttttcggcgttacggtcgtattttaggtcgtaggtttagggtagaggaggttcgttcgtgcgtttttggggtcgaggttttgacgtttcgagggtcgcggaatgagggatcgagggtggatttggcgggaatttattggaaggagttcgtgtggtggggaaaggttttcggttgcggatgaaggggggatggggtgggtatagtcgtgtaggttatgtgttggggtcgtgcgtttggcgggttatgtgttaagggttttgggggttttagaaaagggtttttaggtcgggcgcggtggtttacgtttgtaattttagtattttgagagttttaggcgggcggattacgaggttaggagttcgagattagtttgattaatatggtgaaagttggtttgtattaaaaataaaaaattagtcgggtatggtggcgggcgtatgtagttttagtagttcgggaggttggataggagaatcgcgtgaatttcggaggtcgaggttgtggtgagtcgagatcgcgttattatattttagtatgggtaatagagagagatttcgttttaaaaaaataaataaataaataaataaataataataaagggtttttgaagaagtttttgtgtttggagtggcgagattgttggaagatttgggagtttttagagtttatattttttatttttgatagtttttcgatttttgaatttttatcgttatttaaatattaagttgtttgtgttatattattattttaaa

SEQ ID NO: 272 - DNA, 5986 bp, Artificial Sequence
  chemically treated genomic DNA (Homo sapiens)
tttggaatggtaatgtaatataagtaatttagtatttaaatgacgataaaaatttaagaatcggaaaattattaaggatagggagtataaattttaaaagtttttaagttttttagtagtttcgttattttaaatataaaggtttttttaggaattttttgttgttgtttgtttgtttgtttgtttgtttttttaagacggagtttttttttgttgtttatgttggagtgtagtggcgcgatttcggtttattataatttcggttttcggggtttacgcgatttttttgtttagtttttcgagttgttgggattatatgcgttcgttattatgttcggttaattttttatttttagtatagattaatttttattatattggttaggttggtttcgaatttttgatttcgtgattcgttcgtttgggatttttaaagtgttgggattataggcgtgagttatcgcgttcggtttaagaatttttttttaaggtttttaaaatttttggtatatggttcgttaggcgtacgattttagtatatggtttgtacgattatatttattttattttttttttattcgtagtcgggagtttttttttattatacggattttttttagtgagttttcgttaaatttattttcggttttttatttcgcgattttcgaagcgttagggtttcggttttaagggcgtacgggcgggttttttttgttttaagtttgcggtttggggtgcggtcgtggcgtcgaaagattcgtatgttcggcgatttagttttttaggacgaagaaaggatagaagtgtcgttcgatagcggtgcgttagaaattcgggttcgaggcggcggtagtagtcgagtttttcgtttgacgtagtagaggcgtaggttaaagtgcggtcgttatcgttatttcgtcgttttttattttttttgttcgttatagattcgattcgtattgcggtttcgttagcgtcgggttttttttttagtttttatttttcgcgtcggagcgggttcgtagcggcggagattcggacgtaggtttggggaagacggttcgtaaggtagaggttgtttattttgagggtttttgtttgcgttatacgcgggtttgtatacggttttatatacgtcgttgcgtacggttttttttcgtttcgtttacgcggttaattagcgcgcggggttcggtagtttaattagagtcgttcgcggtagggtcgtttattagagcgcggcgcggggcgggtgtttttgcgcgtagcgttttttttcgtcgtgtttcgcgcgcggttttttacgtcgggattcgggtttcggtgtttttcggtttatttttagttgggttcgggttcggttagattgggtggaaatttggttgattttggtggtttgttttggttagttggagtaaagggatgttaggggacgggtttcggtgtagtgattgttattagtttggggtcgtagaaagttttttttttttttcgggtttttgttaggtttttggtttttagagttaggttcgatttttagataatatttaagtttgtagaaaaggggatgttaagttacggtggttacggttgtgggatgtagtttttgagatttgtattaatttttgtgagtcggggaaaggttttgttgtttttttcgttaggattgatgtgtttttttaagatgaaagtgtttggtaagggcgaggggtttttttgggaaggttatgagtatgtaaggtaatggggtttagattgtgatttttggtacgtttatgagtgatatttttcgggagggtaaggataattatttgatttggtttgttatatttaggaatagattttagtttagttgtggtattttttttaaaagagatttgtgtatatagttttagatagttttgttaagattaaatttaatttaaattgttaattataaaatattttagaattttgttttattttagaatggttttattcgaaataaaaaaaaaggaagagttttaagtttcgttttagtgaaatttgttagtttaatattatgatttatttttttttttttttttaattttttttttttttaagagtagggttttgttttgtcgttgggtttataggtataagttattaattttaaatttcggggttatgatttttgaaattatgttcgtgagaaggtagagtatatgtgttgagagttagattttaaatttgggtttaaattattagtgtttaattattgtaaagtagttaggaggttgcgtttaatatagtaattattaaagaatgaatgtataattttaaagattaatgatattttaaatttttttttttttttgagaacggagttttatttcgttgtttaggttggagtgtaatggtacgattttagtttattgtaattttcgttttttggatttaagtgatttttttgttttagtttttttagtagttgggattataggtatgcgttattacgttcggttaattttgtatttttagtataggcggggtttttttatgttggttaggttggttttaaattttcgattttaggtgattcgtttatttaaagtggtgatcgtttttttaaagtattgggattataggtatgagttatcgcgtttggtcgaattttttaaatttatttattattattttttgagatagggtttttttttgttgtttaagttggagtgttgttttagtttattgtaattttcgttttttatgtttgattaattttgttttagttttttgagtagttgggattgtaggcgtttattattacgtttggttaatttttgtatttttagtagagatggggttttattatgttggttaggttgggtttgaatttttggttttaagcggtgttaggttaaagtgttaggattataggtgtgagttattgtatttagtgtttttaaagtgttaggattataggtgtgagttattgtatttagttttaaatatttttttaattaaagtaatttaaggtaaaattttttaattaaatttaatttatttttaattagattgaataaatgtttagtagtttatgtgttgtgttaaaatacgatatattatttgttaataaaaaatagtattttgtatttatatagttttattattaagaagtttatttagttttatgattttttttttgtaatttgattaatttttatagtattttgaagtaatgtatagtgtagtaattagatatttaggtagtgatttcgtgagttttgataatgagttaatataatgtaagaggttatgtatgaagtttaatttgggtgcgtttatattatattaagaggataagttaaaattattatatggttaaaaattaatattttttgatttatttttgtttattattttaattatagtattgtataaaatgtttgttatttattatagatttaggaatggaatatttttaatattaaaataaaaattttaatagttatagaaaatgaaagtgagtgtgagatagagatattggatataatgttttataggttttaaaagatttaagtagaagaaatggaaataatgtttttattttttggtagtggagtggtaatagttaatggttttttttatttggtatgtagttttttgtaacgattattattaatagagttaggttgatcgtgaggcgttagaaaaggtgtatggtggaatttaattataatggtttgtattgtttggatatattttttggtatgtttattttattagaaatgtttgaaaataggaaaaagtttatttaaaagataagttgttagtgggatttgaagaggtttttattatattttttttttttggagatgttttatttttttttttttttttagtgtttagttttatgtttagtattgtaagggttataaaggtgattatttaagatatagagtttgtttttgaagaatttgtaggataataagggttataagaaagtattaagtgtcggttgggttcggtggtttacgtttgtaatttagtattttgggaggtcgaggcgggcggattacgaggttagttgattaagattattttggttaatacggtgaaattttgtttattaaaaatataaaaaattagttggtcgtggtggcggggatttatagtttaagttattcgagaggttgaggtaggagaatcgtttgaatttgagaggtagagtttgtagtgagtcgagattacgttattgtattttagtttgggtgacggagtaagatttagttttaaaaaaagaaaagaaaaaaaaaataattttttagtatttgggaggtcgaggtaggtggattatttgaggttaggagtttgagagtagtttgggtaatatagtgaaaatttgtttttattaataatataaaaattagtcgagtgtggtggtgggtatttgtaattttagttatttgggaagttgaggtaggagaatcgtttgtatttgggagtaagagattgggttattgtattttagtttgtataatagagggagattttgttttaaaaaaaaaaaaaaaaaaaaagttcgggtacggtggattacgtttataattttagtattttggggggtcgaggtagatgggttatgaggttaggagatcgagattattttggttaataaggtgaaatttcgtttttattaaaaatataaaaaattagtattaagtattttgagagaagattagataaaatgttatgatttagtattatttttaaaatgggtattagttgagtaatatttgttaatttttaatttttgtttaaatgtttaattgtatagtatatgttgttaaattgaggggataggtgatattatgtaaatttatgttttgtttttgttagtaaggaaattgtgttttgtgatttgatttggaaagtatgtaattaagattgaggagaataaattgatgtttttatttttcgtatttgtttttgaagtagaaagtttattaagttaaattttgaattaggaattagtaatattagtaatagttaattgttaatatatatatagtttttataatagtttttggtataattattatataaatattattttttatttttattgggtgtttattgtatgttaggtaatgtttttaatttttttatgagtttttataaattttttagaagtatttgtattatttttatgaagaaataggtcgagagagtttaagtaatttgtttaagttagaaagtgaataaatgataggttaggttttaaatatagatagtttatgtgtttgaatagtgttattggttttttagtatttattgaagtttatttttataaaattttattgattttttaaagtgatggtgtagggaatgttaattgatgataaagaaattttgaaatattgataaattatttaatgaatattttattagtttttggttaatttttttgtatttttttttttagtagagacggggttttattatgttagttaggatggtttcgattttttgatttcgtgatttgttcgttttagttttttaaagtgttgggattataggcgtgagttattgcgtttagtcgttgtgagttcgttgattttgaagtttgtagatgaagttggtatttgtagaaaggaaggaaaagatatttgattaagatataaatggataatattttttaggttaatggaagaaattaaaaattttaggatgttagggtttgattttgggttatgtttgtgtagtgagtaggttgtgttgattagagtttttcggttatgtgtatataatgaggatttttttggggatttttttaaaatttagattttgatttagtggtttggggtagaggttgaggttttgtatttttgtataggtttttaggtgatatttacgttgttggtttacggattataagtggagtaaggtaggagtaggtaggttttatttattcggttttagggagttttttcggggttatttggttatatttttttttttt

SEQ ID NO: 273 - DNA, 6203 bp, Artificial Sequence
  chemically treated genomic DNA (Homo sapiens)
attttaattttggtatttaaaaagttaataaaggagtaagttattttgtttatgttatatattttataattttggatatgtggtttttagtttatttttatttaaggatatttatttagtattttatttagtaaagtatattataattaaggatttataaaatgttgttttagatttcggaaaagtaatattttttttaaagaatatgaaattttaaaaatgagaaattaaatagtaataaaaattttttggttaatgttaattatgtggaatttttcgttagttatgtgttgagattattaattgtttggttattgttttagtattattaagtagagataaagttagtttatttaaataaagtgatattgtaaatttaattatgttgataataaattattaaaaaggtatttttggattatttatacgttttttaaaaaatgaattggtaagattgttgtaattttttatttattgtgtatttttgtaaagtaataaagtatgattttattcgaaatttaaatttttaatgtttaatattttattataaattgggtaagattttttttcgaatagtatgtttgatggtataatacgatagaatagtatatttaatggtataattagtagtaaaaaaataaaaaatttgtttgacgtgttttcggaaaacgtaaaatagattgtatatatagtaattttttttataagataatgataaaatgttagagttgtaattgaggattttattaattgaattatatttttgattataatattttgtgtatgttaatagtttttttggagaaattacgggtataggaagttttttttattaaggatattaatataaagtttaatatgaaaaattagtatttagtttagaaatgacgattttagaaatgattttagaaatgacgatttgtatgatttttttattttttataatttagtattaaaattatttaatattgtaaaggatggtagtgttttatttcgttttgttatttaattattgttgatagatatatgtttttaaaaaggttattggtatttgtttgtttttttttatttttttaagtgaatatattttttaatatgtagtaaatatatatgtggagttatgttttgagatttttttgaaggatttgaattaaattgtttaaatagttggtagtttaaaattggaatattttttataagggaaaaataattatttggggaatgtatgttattataaatttatttgatttggaaagtgcgtttttatattaaattaaataattgaataatgggattagaaatttttaattattattaatttcggttatcgggcgtcgtggtttacgtttgtaattttagtattttggaaggtagtggtaggtggatcgttcgagtttaggagtttaatattaatttagtaatatgataaaatttcgtttttataaatataaataaaaaataaaaattattaattttgagtgagttaagtttatttgtagattgaaaaaaataaagtgtaatagaattttgatttaaaaaacgtttttaaaaaagtattttaaaatgttttaagtatgttttaaaaatatatttaaaaatatgtttttaatatattgaagggatttaattaagatttataattatagttacgatataaattgtaagttaaaaggtagtaatttaagttgagatagttattaatatttttcgagtagcgttttttgttgcgattcggcgtcgtattcgttatttcgtttttcggggaggaatttagaaaggaagggtggtatatttttaaattaggttatttatatatgaattaagcggtattataggttgttaataatcgggtttttatttttttttttttttcggcgtttcgttcgtgcgggatattagtttttaggatgcgttaatcgtagatcgtttaagcgtaagaggtggcgagaggttattacggttgtttaatagttgcgtttttaggttgtttggtgtgacgtagtagttttcgttcggattttgaggtttggcgtttcgattgagtcgaggtttgtgttattcgatattttttgcgattcggttttttaggtttatttagcgcggtttttttcggtttttcgagttttatcgtagtttttttttattttcgttttttttcggttttttgttagtgttcgtcgcgatgtttttgcgtaattattttaagtgatattagcgtttatattcgtacggagcgagtttgaagtttttatttttcggaatttaacgtcgggtcgttaagggcgggtatttaagcgaggattagcggattaaggtcgcgattagagtttagcggttttcgcgtagttagagttcgatagtttttgcgtattcgtcgtgcgtatttttattcgtgcgcgtgcgcgtattcgtttttttcgtttcgttttagtattaatcgttttttttttacgtttacgattttttaacgtagtttttttcgtttttcgcgcgcgagtagaaaggtttcggcgtgcgcgcgttcgttcgtttcgcgttttgtcgggaaggggagtgagtagaggcgtttacgtcgcgcgggaggcggaggcgacggcgatttcggtggcggcggcggttacgacggagacggttgttgttcgtttgttttttcggcgttatggcggttgtcgggggtagataagcggagggagcgggagcgcgcgcgcgacggcggcggcggcggcggcgacgattggttatttatagtttttgttgttttcgatttttggtgttttaataatgaatgttagttttatttcgtaggggatcgcgcgttggtgttgcggatcggggtttttttttttttttcgcgtttgtttttttttttttttttcgtacggatttttgtttatttcgagacgtcggagttttaggattgggcggcggagatttcgggtttgggcgcgggggaggtcgtttattcgagtcggtttttttcgtttcgttaagttcgtcggtaagaaagggggcggcgggcgggttaggatgtggcggagaggataggaatcggtcgggcggagggcgggcgcggcgcggtgtttaggcggcggtttagcggtcgggtgaaggtcgggtggttttgtgagtgtcggtggcggtgtacgggtttggcgcgtagggggcgtgtgagcggcgagtataggtcggggtcgtagaacgtatttttgcgtcggttcggcggttttgtttcggttttttcggtttggtgtcgatcgggtcgcgagaggagattcgcgaatggttagtatttagtcggtgcgtgggttttgtcgcgattcgggtttttagtacgtggggagcggcgggagggggagggggcggcggttcgggcgagtttgggagggcgcggggcgggtttgcgggaagtttgaggcgggaagagggatttttggatcgggatggaggttttgggagaggggggtaggttcgcgagggaggttgattggagcgcgttggatggatgagtgaggatggtttttaaatttttttcgagtgtcgttttaaaaatttagtaggagtaaagtaattgttaaaagatagaggattgaagaggtttaataatttagggtagttattgtggagacgtttgagaggatatagcgttgtgtgcgtttggagttttagaatttagggttgtgaaaagggttttagaggatttattcggataagggagatggaggggaaaggaagttaaaatgtatagagaaagttattttgagggacgaaaggaaggtgaaaaggaaagaacgaaaaggggagtgaattttttaaaggaagaaacgggaaaggtagtttgttaatatatttagattttttaagatttaattgtttagtaaggtattttgattagggttgagattaatatttaatattaggaataaatgttgagtagaacggttattttttagataatttgtttttgtagagtttattggatagtagtttagagaattaatattttgatttagatgtagattttgttattattgagttggtaataatttgttttttttttttttttgtggaatggaaataatcgtaggagtgaattttttttgttgaggtcggaggatagttttgtttttagttggttgtttcggtattttttggttggggaaggatttgacgtttttttttttcgttttttttttttttttttttgttagagattttttttgtttattcgtggatggtttgtaggtgattttttagtgttgtattgaaatttttaaaggtggaaatggtgtgttttggtttattatttttgttttaaattttttacgtaaaaaattagatatagtgtatattttattatttttttaattttttttataaaataaaaattaagtgtaaattggttaagtattatttaaatgttattattttattattcgtttatttgttaaataatatatttattttgagttatgtatttttgttgagagtatatggtattttttatttgtttgttttttttatgggagcgtttttagaatttttttatttaagtgtatgaagtttttggtgataggagtgagggtttgattaaaggtaatttttttttatttttttttttattttatttattcgattaagttatttaataagatttcgttatttatttttgggatgtatgtatatgttatatcgtattattttgttttaggagtttataaaaatattgttagttgtagttagtttttaaaaatttttttattttataaatattttaattttttttgttcgaagtatattagtagtagtatattaaattttagttagtagttaggagtgtagttattataagtttagatattttaagtatttaataaaaggtttttattttttttttaatagttgtagtttaattggtttacgtagatttatacgttttagatagggtttaatttattttttttttgtaggaaattttgttaatttattaatatattttttttaggtgaattaaaggagagttttagaaaatttgtgattgttgaagaaaatttatttgtgaatttttatatttaaggagttagtatttatatttattttttaaattgggaagatttatattttattttaaaattttttgataataatttataatgaatggatatagtgatgaagaaagtgttagaaatagtagtggagaattaaggtaagtaagtattttgttattaattgtttattatgaagagagttgaaaatttgatttttttttttattgttattgttgttatttagttttttttataggtagtagagtttttaggttttttttttagttatttaaatattaaaaaaattttgatatacgaatttttttttataatataggttttaattatattttttatttagatatatagtagattttaaatatagaaagtttttgtttatttaaatttatttggaagtttatatttgagttaataattaagttggagtatgtataatagatttaaattgttttgattgttagtgaaatttttagatgaaggtaataaaaatttttttatttatttttttttggtattttgttttttatatttgtattgtttagtgtggtaattattagttatatgtggttatttgaatttaattataaaatatttagaatttatttagttatattagatatattttaagtgttgaataattatatgtggttagtggttattatattggatagtatatagaaaatattttattattggagaaagttttagatagtgttgagttagatatttgttgaaatattattgtggtttttttttatttttagattggagttttaattatttgtgaaggagttaagagtttttgtttgggttaagtgtttgtaaagaagattttttaaattttgtagtttttaaattttgagttatttgtatattagtttataatttatgtagttatatgtattattatatatagaaattaggaatgtgggtattggagttaaattgtttgtttattttatttttattttttattagttgtgtgaattagggtaaattatttaatttttgaggttttgatttttgttttataaagaggggattaaattattgtttattttatttaaagtttacggttgggtttgttggattttgtttgtaattttagtattttgagaggttgaggaaggaggatta

SEQ ID NO: 274 - DNA, 6203 bp, Artificial Sequence
  chemically treated genomic DNA (Homo sapiens)
tgattttttttttttagttttttaaagtgttgggattataaataggatttaataagtttagtcgtgaattttaaataagataaataatagtttaattttttttttatggggtaaaaattagagttttagagattaagtaatttgttttaatttatataattaataagaggtagaaatagggtaagtaaatagtttgattttagtgtttatatttttaatttttatatatgataatgtatataattatatggattgtaaattaatgtgtagataatttaaaatttgagagttatagaatttaaagaattttttttgtaaatatttgatttaagtaagaatttttaatttttttatagataattaaaattttaatttgaaaataaaaaagggttatagtaatattttaataaatgtttggtttagtattgtttaaaattttttttagtgatagaatgttttttatgtgttgtttaatatggtagttattagttatatgtgattatttagtatttgaaatatatttagtatgattaagtaaattttgaatattttgtaattgagtttaaatagttatatgtggttagtggttattatattggatagtataggtatagaagataaaatgttagaaaaagatgagtgaaaaaatttttattgtttttatttagaaattttattaatagttaaaataatttaaatttattatatatgttttagtttaattattagtttaaatataaatttttaaatagatttaagtaaataaaaattttttatatttaagatttattgtgtatttgaatgaaaaatataattaaaatttgtattatgaaaaaaggttcgtatattagaatttttttagtatttggatagttaagaggaaaatttgaaaattttgttatttatgaggaaaattaaataataataataataataaagaaaaaagttaagtttttaattttttttatagtaaataattgataataaagtgtttatttattttgattttttattattgtttttaatattttttttattattgtgtttatttattgtaaattattattaagaagttttaaagtaaaatataaatttttttagtttaaaagatgaatataaatattgattttttgaatataaaaatttatagatgaattttttttaatagttataggttttttgggatttttttttgatttatttaaagaaaatatattaataaattaataaaattttttgtagaaaaaaggtaaattaagttttgtttaaaacgtataaatttacgtaggttaattagattatagttgttaaggaagaagtgggggttttttattaaatatttaaaatatttagatttgtaataattatatttttgattgttaattagaatttagtatgttattgttaatatatttcggatagaaaaaattaaaatatttgtggagtgaaaggatttttagagattaattgtaattaataatgtttttatagatttttaaagtaaggtgatacgatgtaatatatgtatatattttaagagtagataacggagttttattagataatttggtcgaataaatgaagtgggggggggggtgggaggaggttatttttaattaagtttttatttttattattaagaattttatatatttgagtgagaaagttttgaaaacgtttttatgggaggaataggtaaataaaagatattatatatttttaataaaaatgtatagtttaaaataaatgtgttatttaataggtaaacggatagtgggatgataatatttaaataatatttaattagtttgtatttggtttttattttgtgaaaaaaattgaaaaggtaatagaatatatattatatttgattttttacgtaaaaaatttggggtaagaataatgaattaagatatattatttttatttttaaagattttagtataatattgaagaattatttataagttatttacgaataaataaaggagatttttggtaggggagggagaggaagaagcgggggaaggagacgttagatttttttttagttagaaagtatcgagatagttaattgagagtagagttgtttttcgattttagtaaagagaatttatttttacgattatttttattttataagagagggagggaaatagattgttattaatttaatgatagtaaagtttgtatttggattaggatgttaattttttagattattgtttagtagattttgtaagaataggttatttaaaaagtaatcgttttatttaatatttatttttaatgttaaatattaattttaattttagttaaagtgttttattgaataattaagttttaaaaaatttaagtatgttaataaattgtttttttcgtttttttttttaaaaagtttattttttttttcgtttttttttttttatttttttttcgttttttaaaatggttttttttgtatattttaatttttttttttttttattttttttattcgaataagttttttgagattttttttataattttgagttttgaagttttaagcgtatatagcgttgtgtttttttaagcgtttttataatgattattttaagttattaaatttttttaattttttgttttttagtagttgttttgtttttgttaagtttttaaagcggtattcgaaagaggtttggaaattatttttatttatttatttagcgcgttttaattagtttttttcgcggatttgttttttttttttagggtttttatttcggtttaggagttttttttttcgttttaaatttttcgtagattcgtttcgcgtttttttaggttcgttcgagtcgtcgttttttttttttttcgtcgttttttacgtgttgggagttcgggtcgcggtaggatttacgtatcggttaagtgttagttattcgcgggttttttttcgcggttcggtcggtattaagtcgaagaggtcggggtagggtcgtcgggtcggcgtaaggatgcgttttgcggtttcggtttgtattcgtcgtttatacgttttttgcgcgttaggttcgtatatcgttatcggtatttatagagttattcggtttttattcggtcgttgggtcgtcgtttgggtatcgcgtcgcgttcgtttttcgttcggtcggtttttgtttttttcgttatattttgattcgttcgtcgtttttttttttatcggcgggtttggcggggcggagggagtcgattcgggtggacggtttttttcgcgtttaggttcgggattttcgtcgtttagttttagggtttcggcgtttcggggtaagtaagagttcgtgcgggggagggggaaggggatagacgcggaggggaaggggaagtttcggttcgtagtattaacgcgcgattttttgcggagtggagttgatatttattattgaagtattaagggtcgagggtagtaagagttataagtaattagtcgtcgtcgtcgtcgtcgtcgtcgtcgcgcgcgcgttttcgtttttttcgtttatttgttttcggtagtcgttatgacgtcgagaaagtaagcgagtagtaatcgttttcgtcgtagtcgtcgtcgttatcgaggtcgtcgtcgttttcgtttttcgcgcgacgtaagcgtttttgtttattttttttttcgatagagcgcgaggcgggcgggcgcgcgtacgtcgaagtttttttgttcgcgcgcgggaggcgggagggattacgttgaagggtcgtgggcgtaggaaaaaagcgattggtgttggggcggggcggggggggcgagtgcgcgtacgcgtacgaatgggagtgcgtacggcggatgcgtagaggttgtcggattttgattgcgcggagatcgttggattttggtcgcggttttagttcgttgattttcgtttgggtgttcgtttttagcggttcggcgttgaatttcgggaagtgggagttttaggttcgtttcgtgcgggtatgggcgttaatgttatttgggatggttgcgtaaggatatcgcggcggatattgataaggaatcggggaggaacgggggtggggagagattgcgatgggattcgggaagtcgggaagggtcgcgttgaataagtttaaggggtcgggtcgtaaggagtgtcgggtagtataggtttcggtttagtcggagcgttaggttttagggttcgggcgggggttgttgcgttatattaggtagtttgggaacgtaattgttgggtaatcgtggtggtttttcgttattttttacgtttgggcgatttgcgattgacgtattttgggagttgatgtttcgtacgggcggggcgtcggaggaggagagaaaatagagattcggttgttgatagtttgtgatgtcgtttgatttatgtgtgggtggtttggtttagaaatgtattattttttttttttaggttttttttcggagggcggggtgacgggtgcggcgtcgaatcgtaataaaaaacgttgttcgagggatgttagtaattgttttagtttaagttgttgttttttagtttatagtttgtatcgtaattgtaattgtggattttagttaaatttttttagtgtgttggaaatatatttttaagtgtatttttgaaatatatttagagtattttgaaatgtttttttgaaagcgttttttaaattaaaattttgttatattttattttttttagtttgtagatgaatttgatttatttaaggttaatgatttttgttttttatttatgtttgtagaggcggggttttgttatgttgttaggttggtgttgaatttttgagttcgagcgatttatttgttattgttttttaaagtgttggaattataggcgtgagttacggcgttcggtggtcgaggttaataataattaaaagtttttaattttattgtttagttatttgatttggtgtaaaggcgtattttttaagttagatgagtttgtggtaatatatattttttaaataattattttttttttgtgggaaatattttagttttaggttattagttgtttaaatagtttggtttaaattttttaaaaaaattttaaaatataattttatatatgtatttattatatattgaagggtgtatttatttggagaagtaggagaaagtaaatagatgttaatggtttttttgaaaatatgtatttattagtaataattgaatagtaaaacgaagtggaatattattattttttgtaatattagatagttttaatattgggttgtgaggaatgaaaagattatataaatcgttatttttgaagttatttttgaagtcgttatttttgaattgagtgttaattttttatattaagttttatgttaatatttttaatgagaggaattttttgtgttcgtaatttttttagagaaattattaatatatatagaatgttgtaattagaagtatagtttagttaataaagtttttaattataattttgatattttgttattgttttatgaaaagaattattgtatatatagtttattttacgtttttcggaagtacgttaggtaggttttttgtttttttattattaattgtgttattgaatatgttattttgtcgtattgtgttattaaatatgttattcgaaaaaagattttgtttaatttgtaataaaatattgaatattggagatttagatttcgagtaaaattatattttattgttttgtagaagtatatagtaggtggaaaattgtaataattttgttagtttattttttaaaaagcgtgtaggtaatttaaagatatttttttgatgatttgttattaatatagttaaatttgtagtgttattttatttgaataaattagttttatttttatttagtggtattaaaataatagttaaatagttgataattttaatatatgattaacgaaaaattttatataattaatattaattaggaggtttttgttattatttaattttttatttttaaaattttatattttttggaaagaatattattttttcggaatttaagatagtattttgtgggtttttaattgtgatatgttttattaggtaaagtattaaatgggtatttttaggtggggataggttgggaattatatatttagaattgtgaaatatataatataaataggataatttgtttttttgttagttttttggatgttagggttaagat

SEQ ID NO: 275 - DNA, 11047 bp, Artificial Sequence
  chemically treated genomic DNA (Homo sapiens)
taagatgttattttagtgatttttaatacgtttagggaaaaaagagatttaaaattggtaattttatgttataatgtgataattaagtttataaggaattgtgattaaaaaaaaagtttttgatatgtatgtatattataaatatattaaagattagtgtaaaataagggatatttgaggttatatgtaaagtaatgtggggcgtaagataaaattgtatgtatgtttagtattgatttaaaattattagggtgataggaagaaaagaggtgaggtttattttttgaaaagaaagtaaagggattattgaatttttaatgttattttttaaatttttaatagttaaagtttaagaagttatattagggatagattttttggttattatttatattgattaaaataagtgtgtagtataaaagggaatgataatttataatttttttgacgtaaagtaataggtttgggagatgggaagtggtttaagaggaaaattattattgtttagttttgattttttagtttatattgttttaggaataaaggttaagttttaagtagagggtgttgagaatttaataaatgtagttgaatgataatggtcgttttttgttaagtaggttgaggtagatgtatattttaaggtaattgttttgatttatttaatttaagttagaaaatggttgtgttttagtttaaagttagataattggtttattggtggttttataaaattttgatttttgtttatttttaaatttatattttgggttaagtttttaagttgtttgtttttgggtaagatagtaaattttattaattaattaaatttttatttaggattatggatttttttgtttgggtatggagaggttagtgattttattttttagataatgagattttattgtttttaaatttttttgtaagtttttataagttggtttgtgcgaagtttttttttttgtaatttgaatataaaggatttaaatttttattattttaaaatgatagttaaagaaaagttattatatttttttaatattttaataattaaaagagtaagtatatttttatagaattagtttagagtaaggatgataaatgttatattgttttttttatattgttatgggagatttttaagaaaatttattaaatagaggttgagaaatttagattttgttacgtagtaattttttttttttttaggaaatttatgagattagtagatgatgtttattgttaatatttttaagtaaggtaggtgaagtttttgtgttatttttaagagataagttgtatatttttaatagggaagaaagtatattatttgaaaattttttgttaaaagtttttatttatttagaaattgtgtttgtttgttttttgtttttttatataaaataatagaaaaaattggtagggttttaaagtaaaattattggaagttatataagttttaaggatagaatttaaaggggttaggatatttttttatttagtttgttatttagattaggtttgtagtgggttagttgtaagttatttattattattattaaggaagttatatttttttagggattaaatgttattttggattgttgaagaattttatatttaggtagtagttaggagaggagttaagtattatttgggattgtatttattattttttgtttttatttatttttttgttattagtgtgttatttgatatggaataagagaaaagtttttttgggaaatttgttttttgagatattattgtttttattttattttgtttaggaaatatagtatggtaggtatttttaatttttgtaagttttagaataggtttatggtatatgatatacgatttttttatagagttgggatgtagttttatatttttttttaatttagtgttttaagtagtcgttattattggattggagttgttataagataggaagttttttgatatttttagttgtttagaatagaatattatgattaatataaatgtagtgtagtttatttgtttataaatttttaaaatgtattaagaattggttttgaaaaaaaaaggaattggttttattttattaagtaatatatatatcgtttatttttttttagaatagttatttttttagattttttttttaagaaaaagttatttaatagtagaaatgaaaaagaaaattaaatattgatttttaaagattttaaaatgtttatagatttgagtttattttagaattagaatttttaatattgaagaagggaatagggaagatttattgttttttataaatattttgttttttattagtatttttaaatattatattttttaatttaatagtttttttatagttatgtttttttataatttattttttgtattattattatttttaaatatatttttatttgtttataaattttttttattgttttgaaattgttttatagtgtgtagttttttatttgttaaatgtgtatttatttaataattatttttttatatataaagagttgtataaggtattatgaggaatatagatatataaaaaaggaattaattattatagagtttttaatttagagaagatattattattttaaataattataatataaagtagtaagaattgtttttgtttaaggttaagaattattgtggatattgatgttgttaagtttggaatgtggtcggagaaattgttgtagaagttttatataggattttagtgtatatttttggtttaaagtggttcgtagaaagtgatgggaggggtttgtaaggaagaagaggtttttaaatttttttttgaagagaaagtagaatattggtaagtaaaggattttgaatgttaatttatagattaagtattttagagttattttaagttttagagaagtatagtaatatcgttaagaaagttttatgatataagaggaagagattaaaaatttttataggagttgggttttgatatggtaaacgtttaaattagaggttatttttggggaggaaaattttaaaaatatttggtttttaggaattttttttttatacgtatattttattaaagtgtaatagattaaaaggtgttttagttagggtaaattaggtaagtggtttttaaaatttacgttgatttaaaagtttttgtatttttttaaatttttttttaaagaggatagttattttagcgtttatgcgataatttttattgatatagtgggttaaagagtttgttttcgggtatgtaaaaaggtttttttttatataagtgatttaaaaaatgtgtaaaggaaaagataatgttttattagatatagtaaaatattaagttatttttttgtattttgtgttttttacgattatttttttcggtatttttttttttaatttgatttaaagttaaattaattatagtatgtgtaaaaggaaagtaatggatgatttttgtttagaattttgagtttttttaaagtaaattagttagagagaaaaaaagataatgtaattattaatttaattaaaaagtgtttatgtttttgatttttattattacgaattttagtttattaataagttaatagttgttacgtattttgtttttttttggatttttattaaggttgttggttatgatattgagtcgttatttttagaatttaagtgtttttttagttatgagaagggaaaaggaagtaaaaatgtttaggtagttttagtatataatattttgattgttttgtataattatttaataggtttttttttttaacgtttatcgatgaatgtgagtttgttcggtttttgggacgtaatataaaatttttttggggtaaagaggaagaacgtttaggttcggaggttgtttcgattcgtttttatttcgtgtttttttggagcgtttcgtttcgttagcggaagtaaagtttatttttaagatacgtttttttttttttttagggttatttcggagtaaggtcgatttaggacggtttttttttttttgtacgacgtaaaagtatttttttagtgggtttggtttagaagaaaatagaagggatttggttatagtttcgttaagtcgtaattatagagtgtatagggtattggcgtgttgagttttaggcgtggggaaaggaaggcggttttttaaggaacgtttattttttatttttttggggggtgcgtgggagaaggaaagagtttattgaagttttttattttttgttttttattttagggcgggttagcgaggacgtagtttgttttggggttttatgggagggtgcggggaggttcgtttaaagttttaacgtatttaagttattttttatttggaaaggagtcggttgtttggaggttttcgtttcgcggggaagggtttcggattcgattttggtaggtggggagtagcggattagtttaaacgcggagttaatttcgttaaagtttttaattgtacgtatttaagatggtcgttttcgttcggtagcggggcggaaacgagtttttttagtttgttagtcgagtttatattttttggcgaaggtcgtcgaattttcggtagtaaatttcgtggtttttcgtcgtcgttcgcgtatgcgtaacgaaattgttttacgagtcgggaaaagtggcgtttgcgtattagtcgtaggggtgtgttttagtggttatttggaaaggggtgggtagttggtaaaggggttagttagcgtttgcgtagtattaagtttaaggtagcgttttgagttgaagggtttggcgcgtttggaaagcgtttgcgtattttttttattgggggtggtgttaaagcgggaaggtgggcgtggttttagggaacgtttgcgcgttgttttttcgaaggggtggggcgatttttgaattggagttagtgggcgtggttttagaggcgtttgcgcggaggcggttggagggaggttcgatttttttttgttcgggttcgttattttgttaggtagcggtagtggcggcggtagcggcggttggagtttttgattgggtttcggagttcggtattggagttaattagcgcgggtagcgaatcgggggagcgaggtacggtgagtgtgaggagttaatatttagcggtttagagtcggttttagcgtttcgattggcgggtttcgttgattatttaggagaggtttaggcgttcgtcgagttcggggagtcgagttgagtttagtcgagtcgggcggttagcggtttcggttcggggtttgcgagcgtttcggggtattttcggtcgaggtttgtaggggtcgtttcgcgcggggatggcgtttcggggagtaggtatttcggggtttcgattttcgtagggtgttagggttagttgggaatgcgtttttgtttttcgatttaggtttaggtttttaggttttaggtttggggttacgaatggttttatattaggggatatatgcgcgttttgggtttcggcgatttttttttggtcgttttggtcgtaaatttaaatttgtttttgtattttttatttttcggtttttgggataggaagttttttcggggttcgcgtttttcgtttttcgtttttagcgagtcgggtttgttttatttgtagtttttttaggtcgggagggaggtttggggagggtgcgcgtcgcggtcgcggggtttcgtgtgcggttggtaacggggttggttcgtttacgtttcggagttttatgggttcgttttcgttgtttttttggtggggagagggggtcgttagttcgtttattttttttgtttcgtcgcgtttttttttttagttcgtttcgttcgggttttcggttcggcgtcgttattattttttttggttcgttattttttttttttttcgtttcgttcgtagtggtaggatcgtatattttcgttttggagtttaattaagcggttttcgttttttgttcgggttgtaagattagtttattcggtgtttggaattttatttttagaagattgatatttttgcgtatttttttcggaggttgtataatttgttgtttatattattaattttatttattgtttattttgtgaaattttttttttttgggaatatagtatagttttgggggttttttttttttttgtttttgttttcgtttttttatgttattttgtgttaggtttgatttagtttatttattttttggtttatgtttttttgatatatttttaagttttgtgttaacgtttttttagtagatgtttagaaattaatagtgttgtggggttttttttagggtgagaggttgttgttggtaattaattatttagtagttagtatatgttaggtataattcgtgtgttagggagggagtacgtagaggttaataagaattgtgtttatttgatggaaattgataggtgaataggtagttaatatttaacggttagtgttataaaggggttaagtttagttgttgtgaagtatttatgcgtgagttagttttcgtgaaaggtttattattatcgtatttttgattggttttgaagaatgatggtaatttttttataggaaagatggaagagtttgttcgaagagaagaaaagtatgtgtagaggaattaaattatattgttggaggtaggaagatgggatagggaagtgggtagtagttgtgatagtttaggggggaaagtttagttggtaaaatatttgtatattttgttaaggaatattttggaaatagttattattttgtatggaggtttaagtagaagggatttagagttatatttttttttaagattgaaaaaacgagtttttgatttgtttatgggttttgtttcgtgatagtggttgagttttttggggatgaagaggagatttgttttaggattttgaaaattatttttatttatgtgaattatttagtgtattttttggtatataaaggttttaagtatttggtgtttatttttaaatttatatttaatgttatataattaataggttttagaaaattcgtattttagtgtttttttattattaaaatttcggggataggttttatttttattttttagggtgagttttttattgttgtttaagtgatttttttaatttatttgattgttacgttattcgtattagtagatgagatgatagagtttaagtagtttaaaaaatatgtatatttgtttttggaacgtttttttgtttgtttttggatatagggtttttttttgttatttaggttggagtatagtggcgtaatcgtagtttattaatttggaatttttgggtttaagttattttttttttttgtttttttaaaacgttgggattataggtatgagttattgcgttttgatttgaaatagatgttttaattttagtatttaaaaataggtatgttttggttattttaaaattattaaatatttttgtttggtatttttttaaaaggtattataatttggtaatttttttgttaaatattttataagtttttattagtttgtagaagaatttttttgtttgatattttgagagaaagtagtgtggttttaagtttttttttttgtttagtttattgtttatatgttgaaatatttttgtttttgtttttatgtttttttgatttgtagtattttatttttttttatattattatatagttaaattttttttatatttaagattagtttattttgtaggtttttgatagtaaagaaaaaaaaagtttaagtagtatttttttttttttaagttttgttgatttatttttagttggaataaatttttgttttttaaatttttatattattttattttttaggattttagtataggtttttagtttattattaaatttaaagattttttgaagtttgaattttcgttagagatttttttttatttttaaaatttttagaatagtgtttggtatatggtatataattagtggagagaagtgtattagaaagttttaatttagaaatttgtaggatgatggggaagttggatagttttttgttgtagtttagttttttattaagcgtttattaggatttatttgttgagttgtgaaagaaattgagtgagttaatgttgggaatttttaaataatagaatagaaaatatttgttaggtatgatgatggtttacgattgtaattttagtattttgggaagtcgaagtgggagaattttttgagtttaggagtttgagattagtttgggtagtatagggagatttttttttttaaaagaaaaaaaagaatagaaaatattaaagtgtattttgtgttgtataaaggtaaatgttgttttatgaaatttttattttagttatatgttttatatatgtgtgtattgagttgtgataatgaaatgtgttttttattaagggttgtggttaaaaaagttaaaaagttattgttttaggttttgtttggtagtgattattaattgtgataattttatggttttttatatgtttatattagttgagtttttgaagaggttttagttttggagtttgtgtaggtttatatagaatgggtttttagtaagtggttggttaagttttagtttttgtattttggaatagtggggtaaagagaattgtattgagaagagaatgtattaggaagagaatttttatgttagttagaataaatatttattatttgtttttttttttttgaggaaaaattatttaaaattttgtgttaagagtaagagttagatagattaaatttggtttagtttgttataattttgggtaaagaggtattttgggaaagattatcgaattgtattgtagttttgttaattgaagtttatagtagtaggaatatatgattttattgaagttagttgtttatagtattaattattaatagtattaatattatgatataggttaaattattttgttattaatgtgagagagaattgttgttagatttgaagttgttttttaaattttgatattttttaaagtataaatttaaatattgttaaattggtttatttgtattattagaataaattagttaagaagaaaatttgtacgttatatatattagttattatgtgttttaagttatatttagttttgtaaagatgtaaatttttggatattagttaaggaaaaaattttatataagaaggaaatttggagttggggaggcgttgaaatttaaaagatattttttttatgatttttattttttaaaattaatttattgagagatattttagaaataaagtataataattttaaatgtgtattttgatgagttttgataaatttgtatatttgtgtaattgttattataatgaagatataaaatatttttattattttataatgtttttaaggttttatgttagttaattttttttttttttgtttttttgtattttttatttttaaggaattattgatttattttttgtttttagattattgatgttttttggagattttatataaatggaattatatatattcgtttatattataattttaattttattagtttatagttataaatgtattgtgtattagagataagatagaatttagggaagtttgttagtgtttttaatagatttatagtttggttgaaaatttgattttttattttatatttagaatttttgaggagtagatttagttaattaattttaaagagattggtgtaaaaattagaaaatcggtttgttatgttgttgattatatttgttttttgttggttaatttatatgtaaatttaaattatagttagaaatttatttagcgagtattttattagattaagggtagtgttttggagaattatatggttataagtttttttgttgtgatgatatagtttgttatttatggtttatagatttttatgttgtatttattttggttatgagtaatggggttgattaatttttattttgattaaattttgttatattttttttaatattttaatatttatttgggaaataagaattttttaaaatttttattttagaaataagaatttttaagtgtgtagtgaaattaaaggaatttgaaaataaatatttgtatatttgttagttagggtttattaatattttattataattgttttattagatatttttttatttatttatttattttttgatgtattttaaagtaaattttagatattaatatatttttttttaagtatttggatatatagttgtatatattttggtttttttttttatattgtattgagatattttgtaaatgattaattttattagtatgtgtggatttatggagagtggtattgtattttgttacgataatgagtagtttagttaggttacgttattttattatttagatgttggaatttatgagggtttagtgaaaaattagagagaaagatttatttatatttttgtttatatatttgtttttttttttatatttttaagatgaattgtcgattgttaatttatattattttaattttttaatgaagtttttattaaaggtttttagatattatttagtttatttaattgtatttttatttttaaaagtggatttttaatttttaaagtttatgagaagggtaaattttgtttattatatgtagtggatttgagtaatatgtttggtgggaagtaattacgtgttataatttaaagaagttttattttttaaagtatatgtgtaaatttgaaaattagtgttaggtatgttttgtattaaagtgatgtagtttaacgagtattttttaggtgtaagtattgttttgatagtattgaaaggtaaggttgttagtatattgaaagtattttagaaacgtgaaaatagtattatgttgttatgattgtgttatgtaattttagttaaaaatgatattgaatataagtattttttatttttttattttgtttttttgtaaataaagtatagtgataaattatttaggttaattgtttggtaaggtttttattgataattttattttagtttttttttttatttttttaatagg

SEQ ID NO: 276 - DNA, 11047 bp, Artificial Sequence
  chemically treated genomic DNA (Homo sapiens)
tttgttagaaaggtggggaaagaaattaaagtgagattgttaataaaggttttattagataattaatttggataatttattattgtattttatttgtaagaaaataggataggagaataggaaatgtttatatttagtattatttttaattgggattatatggtataattataataatataatgttatttttacgtttttaaaatgtttttagtatattggtaattttattttttaatattgttagagtaatatttgtatttaagagatattcgttaagttatattattttgatataaggtatatttaatattgatttttaggtttgtatatatattttagagaataaagtttttttaagttgtaatacgtaattgttttttattaaatatgttatttaggtttattatatatggtaggtaaaatttattttttttatagattttaagagttgaagatttatttttaaaaataaggatataattagataaattgaatgatatttgagaatttttaataaagattttattaaaaaattaaaatgatataagttagtaatcggtaatttattttggaaatatgggagggaggatagatatataaataaaaatgtagataggtttttttttttgattttttattaggtttttataaattttaatatttgaataataaaatgacgtgatttaattgagttgtttattatcgtggtaaagtatagtattattttttataaatttatatatgttggtggaattaattatttgtaaggtgttttaatatagtgtgaaagaagaaattaaaatatgtgtaattatatgtttaagtatttagaaagaagtgtattgatatttaaaatttattttgaaatgtattaaaaaatggatgaatgggtggagaaatatttggtaaggtaattatagtaagatgttaatagattttaattggtaggtatataggtgtttatttttaaatttttttgattttattgtatatttgaaaatttttatttttagaataagaattttgagaaatttttattttttaaatgaatgttggaatgttaggaaaaatataataaaatttaattaaaataaaaattaattaattttattatttataattaaaatggatataatataagaatttatgagttataaataataggttatgttattatagtaagaggatttgtggttatatggttttttaaagtattgtttttgatttaatggaatgttcgttaggtaaatttttagttataatttggatttatatatagattggttaatagggagtaaatataattagtaatatgataaatcggttttttgatttttatattagtttttttggaattggttgattaagtttgttttttagagattttgggtatagaatagaaaattaggtttttagttagattgtgagtttgttaggggtattaataggtttttttaaattttattttgtttttaatatataatatatttatggttataaattaataaaattaaggttatgatgtaaacgaatatatatgattttatttatataaaatttttaaaagatattagtaatttagagatagaaaatggattagtggttttttgggagtggagaatatagggagataggaaagagggaggttgattggtatggagttttaggaatattgtagggtgatgaaaatgttttatatttttattgtggtagtagttgtataggtgtataaatttgttaaaatttattaaaatatatatttaaaattattatattttgtttttaaagtattttttaataaattgattttaaaaaataaggattatgaaaggaatgttttttaggttttaacgtttttttaattttaaattttttttttatatgagattttttttttgattaatatttagaagtttatatttttataagattaaatataatttgaagtatataatgattaatatatgtaacgtatagattttttttttaattagtttattttggtaatataaatgaattaatttagtaatatttaaatttatattttgaagagtattaagatttgaagagtagttttaaatttagtagtaatttttttttatattaatgatagagtgatttagtttgtattatgatattgatattgttaatggttaatgttataagtaattggttttagtaaagttatatgtttttattattgtgagttttagttagtaagattgtaatataattcgatagttttttttaaagtgtttttttgtttaagattatgataaattaagttagatttagtttgtttagtttttgtttttaatataaagttttgaatggtttttttttaaagagagagaaataaataataagtgtttattttggttagtatgaaaattttttttttagtgtattttttttttagtgtaattttttttgttttattattttaaggtgtaaaagttgagatttagttaattatttattaggaatttattttatgtggatttatataaattttaaagttaaaatttttttagaaatttaattagtgtaagtatatgaaaagttataggattattatagttgataattattattaggtaaagtttagaatagtagttttttaatttttttgattataatttttagtaagaaatatattttattattataatttagtgtatatatgtataaagtatgtaattgaaatgaaagttttatgaaatagtatttatttttatataatataagatgtattttggtattttttattttttttttttttttaagagagggggtttttttatgttatttaggttggttttaaatttttgagtttaaaggatttttttatttcggttttttaaagtgttgggattatagtcgtgagttattattatgtttggtagatattttttattttattatttaaaaatttttagtattggtttatttaattttttttataatttaataagtgggttttgatagacgtttgatgaaagattagattataataaagggttgtttagtttttttattattttatagatttttggattggagttttttaatgtatttttttttattaattatgtattatgtgttagatattgttttgaaggttttaaaaataaaaagaaatttttgacgaagatttaaattttaaagagtttttaagtttagtaatggattaaaaatttatattggaattttaagagataaagtgatatgggaatttggaggatagagatttgttttagttggggataaattaataaggtttaaaaaaaaaaaggtattatttgaattttttttttttttgttattagaggtttgtaggatgaattggttttaagtgtgagaaagatttagttatgtgatgatgtggaggaaggtgaagtattataaattaagagagtataaaaataagaatagaaatattttagtatgtgaatagtggattaaataggaaaaaaagtttggggttatattatttttttttaaaatgttagataaagaaatttttttgtagattggtggaagtttgtaaggtatttagtaaaaaagttattagattataatgttttttagaaagatgttaagtaaaagtatttagtgattttgaagtgattagaatatatttatttttaaatattaaggttaaaatatttattttaggttaggacgtagtggtttatgtttgtaattttaacgttttgggagaataagaagggaggatggtttgagtttaggagttttaggttagtgagttacgattgcgttattgtattttagtttggatgatagaggaaagttttgtatttaaaaataaataaaaaaacgttttaaaggtaaatatatatgttttttagattatttaagttttattattttatttgttaatgcggataacgtgataattaaatgaattaagaaaattatttaagtaataatgaaaaatttattttaaaaagtgaaaataaaatttgttttcgaagttttagtaatgaaagagtattggaatacgagttttttgaaatttattagttgtataatattaaatgtgaatttagaaatgggtattagatatttaagatttttatgtgttagggaatgtattagatgatttatatgagtaaaaataatttttagagttttaggataagttttttttttatttttaaagaatttagttattattacggggtagaatttataaataagttagaaattcgtttttttaattttaggaaaaaatatagttttagattttttttatttgaatttttatataaaataataattgtttttaaaatattttttagtaagatatataagtattttattaattgggtttttttttttaaattattataattattgtttatttttttattttatttttttgtttttaatagtgtaatttgatttttttgtatatgtttttttttttttcgagtaagtttttttattttttttgtggaagaattattattattttttaaggttagttaaaagtgcggtggtgataagttttttacggaggttagtttacgtatggatattttatagtaattgaatttggtttttttatagtattaatcgttaggtattaattatttgtttatttgttaatttttattaggtaggtatagtttttattgatttttacgtattttttttttaatatacggattatatttggtatatattaattgttggataattggttgttaatagtaattttttattttaaggaaaattttataatattgttagtttttaaatatttgttgagaaaacgttaatataggatttgaaagtgtattagaaaaatataaattaagagatgagtggattgggttaagtttgatataaagtaatatagaaaggcgaaggtaaaaataaagggaaaaaaaatttttaaaattgtattatatttttaagggagggagattttataaaatgagtagtggataagattagtaatatgaatagtaagttgtgtagttttcggaaagaatgcgtaagggtattaattttttaagagtgaggttttaggtatcgaatggattggttttatagttcggataagaaacggagatcgtttggttgggttttaagacggaggtgtgcggttttgttattgcgaacggggcggggaagagaggaaatgacgagttaaaaggggtggtaacggcgtcgggtcggagattcgggcggagcgggttgggaggaggggcgcggcggagtagggggagtgggcgaattaacggttttttttttttattagggagatagcgggggcgggtttatagggtttcgaggcgtgggcgggttagtttcgttgttagtcgtatacgggatttcgcggtcgcggcgcgtattttttttaggtttttttttcgatttagaggggttgtagataagatagattcggttcgttgggagcggggagcggggggcgcgggtttcggggaggttttttgttttaagggtcggagagtggagagtgtaagggtaggtttaagtttgcggttagaacgattaggaggaaatcgtcgaggtttagggcgcgtatgtgttttttagtgtagggttattcgtggttttaggtttggggtttgagaatttgggtttgagtcggggaatagggacgtatttttaattggttttggtattttgcgagggtcggagtttcgaggtgtttgtttttcgaggcgttattttcgcgcggggcggtttttgtaggtttcggtcgggagtgtttcgaggcgttcgtaggtttcgggtcggggtcgttggtcgttcggttcggttaggtttagttcgatttttcgggttcgacgggcgtttgggttttttttgagtggttagcgagattcgttaatcggggcgttggggtcggttttgggtcgttggatattggttttttatatttatcgtgtttcgttttttcggttcgttgttcgcgttgattggttttagtatcggatttcgaaatttaattagaggttttagtcgtcgttgtcgtcgttattgtcgttgtttagtaaaatggcgaattcgaataaaggggaatcgggtttttttttaatcgttttcgcgtaggcgtttttgaggttacgtttattaattttagtttagggatcgttttattttttcggaggagtaacgcgtaggcgttttttgaagttacgtttattttttcgttttgatattatttttagtgaaaggaatacgtaggcgttttttagacgcgttagattttttaatttaaaacgttgttttgagtttagtattacgtaggcgttaattagtttttttgttagttgtttatttttttttaagtggttattaggatatatttttgcggttaatgcgtaagcgttatttttttcgattcgtggggtagtttcgttacgtatgcgcgggcggcggcgggaaattacggaatttattgtcggaagttcggcggttttcgttaaagagtgtgggttcggttagtaagttagaggggttcgttttcgtttcgttatcgggcgggggcggttattttagatgcgtgtaattaagggttttggcgggattggtttcgcgtttgggttggttcgttgttttttatttattagggtcggattcggagttttttttcgcggggcggggatttttaaataatcgatttttttttaggtgaagggtgatttgggtacgttggggttttgagcgagttttttcgtatttttttataggattttaggatagattgcgttttcgttgattcgttttagggtaggagatagagaatgggaggttttaatagatttttttttttttttacgtattttttaaaaaagtggggggtgaacgttttttgagaggtcgtttttttttttttacgtttggggtttagtacgttagtattttgtatattttgtggttgcggtttaacgggattgtggttaagttttttttgtttttttttaagttagatttattggggaaatatttttgcgtcgtgtagagaaaaggagatcgttttaaatcggttttgtttcggagtggttttggagaaaggaggaggcgtgttttagggatgggttttgttttcgttgacggagcggggcgttttaggaaagtacgaaatgagagcgggtcgagatagttttcgaatttaagcgttttttttttttgttttagaagggttttgtattacgttttaggggtcgaataaatttatatttatcgataaacgttggggaaaaaagtttattaagtggttgtatagggtaattagaatattatatattaaggttgtttaagtatttttatttttttttttttttttatagttgaagaaatatttaaattttggaaatagcgatttagtattatggttagtagttttaatgaagatttagaaggaagtagagtgcgtaataattattgatttattggtgaattgaaattcgtaataatggaggttaaaagtataaatattttttaattaaattaatgattgtattatttttttttttttttagttgatttattttaaaaaggtttaaaattttaggtagggattatttattattttttttttatatatgttgtaattggtttggttttaaattagattggaggaaggggtgtcgggagaggtagtcgtgggggatataaaatatagaaaaatagtttagtattttattgtatttaataaaatattgtttttttttttgtatattttttagattatttatgtgaaaggagatttttttgtatgttcgaaaatagattttttagtttattgtattagtgaggattgtcgtatgggcgttgggatagttgttttttttaagaagaaatttggaggggtgtaagaatttttaaattaacgtgagttttggaaattatttatttggtttgttttggttagagtattttttaatttgttatattttaataaaatatgcgtgtaaagaggggatttttaagaattaaatgtttttaagatttttttttttaagaatggtttttagtttagacgtttattatattaaaatttaatttttgtgaaggtttttaattttttttttttgtattatgaaatttttttgacgatattattgtatttttttgaaatttgaaataattttgagatgtttagtttataggttggtatttaagattttttatttattaatattttgttttttttttaaagaggaatttagaaatttttttttttttatagattttttttattattttttacgggttattttaaattagaaatgtgtattagaattttatgtaaagtttttgtaatagttttttcgattatattttaggtttaatagtattagtgtttatagtgatttttagttttagataaaagtaatttttattgttttgtattatagttatttggaatgatgatattttttttggattgaaaattttgtaataattaattttttttttatatatttgtattttttataatgttttatatagttttttgtatgtaaaaagataattattgagtaaatatatatttggtaagtaaaaaattatatattataaaataattttaaggtaatagagaaagtttgtggataaatgaggatatatttaaaagtagtagtggtataaaagatgggttgtgaggaaatatgattgtaagaaagttgttaagttaaggaatatagtatttgggaatgttgataaaaagtaaagtgtttgtgggagataataggttttttttatttttttttttagtgttgaaaattttagttttgaggtaaatttagatttgtaaatattttaaaatttttagagattagtgtttggtttttttttttatttttattattaaataatttttttttagaaaagaaatttggagaagtggttgttttgaagagagatgggcgatatatatattatttggtaagatggggttaattttttttttttttagggttagtttttaatatattttaaggatttgtgaatagatgggttgtattgtatttgtgttgattatgatgttttattttagataattaagaatgttaaaaagttttttattttatgataattttagtttagtgatggcggttatttggagtattgggttagaaagaaatgtgaggttgtattttagttttgtgggaaagtcgtgtattatgtattataggtttgttttaagatttgtaaaagttaggaatgtttgttatattatattttttaggtagagtgagataaaaataataatgttttaagagatagattttttaaaggagttttttttttattttatgttaaatagtatattgatagtaagggggtgaataaaaataaaaaataataagtgtagttttaaataatatttagttttttttttaattattgtttgaatgtggggttttttaatagtttaggatggtatttggtttttgaaagggtgtggtttttttagtggtggtggtgggtagtttatagttaatttattataagtttgatttggatgataaattgagtggggagatgttttagtttttttgaattttgtttttaaagtttatgtggtttttagtggttttattttgggattttattagttttttttgttgttttatgtagagagataaaaagtaagtaagtatagtttttaaataagtagaggtttttagtagggaatttttaggtggtatgtttttttttttgttagagatatgtagtttattttttggaagtggtatagagattttatttattttgtttaaaaatattgataataggtattatttgttaattttatgggttttttaggaaaaggaaagattgttacgtggtagagtttgggttttttagtttttatttagtggatttttttgaaggttttttataatagtgtggaaagggtaatatgatatttgttatttttgttttagattaattttataaaaatgtgtttatttttttaattattgggatgttgggggaatgtgatgatttttttttggttattattttgggatgatgaaagtttgaattttttgtgtttagattataaagaaaagggtttcgtataagttaatttatgaaaatttatagaagagtttagaggtaatgaagttttattgtttgaagaatggagttattgatttttttatgtttaggtaaggaaatttatggttttaaatggagatttaattgattggtggggtttattattttatttaaagataaataatttaaaagtttaatttaaaatatagatttaaaggtggataaaagttaaaattttgtaaaattattagtgaattagttgtttggttttagattaaggtatagttattttttagtttgagttgaatgaattaggataattattttgaaatatatatttgttttagtttgtttagtagagagcgattattgttatttagttatatttgttgaatttttagtattttttgtttgaagtttggtttttatttttaaagtaatgtaagttaaagaattaagattgagtaatggtggttttttttttggattattttttattttttaaatttattattttgcgttaagaaagttgtaaattattatttttttttatattgtatatttgttttggttagtatgggtaatagttagaggatttgtttttgatgtaattttttagattttagttattgggaatttagggaatgatattgagggtttagtagtttttttgttttttttttaggaaatgggttttattttttttttttttgttattttggtagttttgagttaatgttgagtatatatgtagttttattttgcgttttatattattttgtatatggttttaaatgttttttattttatattggtttttgatatatttatggtgtatatatatattagaaattttttttttaattataattttttatggatttaattattatattatgatatgaaattattaattttaggttttttttttttttaggcgtgttgaggattattagagtaatattttg

SEQ ID NO: 277 - DNA, 5179 bp, Artificial Sequence
  chemically treated genomic DNA (Homo sapiens)
gttgtagtgagttaagtgtagtggagttattgtattatagtttggatgatagagtgagattttgtttaaaaaggaaaaaaaaaaaaagttgtaacgtaaagagtttaggtgtagattttggttttatagtttattaaattatgatgtaattttgggtaaattattaattttttaatgtttgtttttttatttgtaaaatggggataattatagtatttatttgaggtcgtacgcggtagtttacgtttgtaattttagtattttgggaggtcgaggcgggcggattacgaggttaggagatagagattattttggttaatatggtgaaatttcgtttttattaaaaatataaaaaaattagttcggtgtggtggtaggcgtttgtagttttagttatttgtgaggttgaggtaggagaattatttgaatttgggaggtagagtttgtagtgagtcgagattgcgttattgttttttagtttgggtgatagagtaagaattcgtttcgaaaaaaaaaagaacgggttttaatatatattaggttttgtataaatatttgttgttatatgatgtttattcggataatttttattgttattgtttaaggtaaggattatattttatttagttttgtatttttagtttttaatataatgtttggtataaattaatagtttttttttttttatttttagtttttttttttatttaattttattttttatagtgttgttaaaattattttttttattaggtattatgtattatgatattttttttttttttattaaagtttttagtttttttttgttatttgtaaatttttaagttagataatttatttaaaattttgtttgtaattaaagtgttttaggtttttttttatattaaatagtggtgttagggttatttttttattagtttatatttatatttggtttgttatttatttatttatttatttagagatggagtttcgtttttgttgtttaggttggagtgtaatggtatgatttcggtttatttaattttcgttttttaggtttaagtaatttttttgttttagtttgttaagtagttgggattataggtatgtattattacgattggttaattttgttttgttttttgttttgttttttgttttttgtttttagtagagacggggtttttttatgttggttaggttggttttaaattgattttaggtgatttgtttattttagttttttaaagtgttgggattataggtatgagttattatattagtcggttttttttttgttttttgtttgtttgtttgttttgagatagggttttattttgttatttaggttgtacgatagagtggtgtaattatagtttattgtagtttcgaatttatgggtaatagtgatttttttgttttagttttttaagttgttggaattataggtatgtattattatatttggttgtgtgtggtgtgtgtgtgtgtgtttgtgtgtgtgtgtgtgtgtgtgtgtgtgtgtgtttagagagagatagagttttattttgttgtttaggttggttttaaatttttggttttaagtaatttttttgtttttgttttttaaagtattgagattataggtatgagttattatgtttagttcgttatatttatatttatttatgagtatttgtaaatatgtatatatgtagtttaaggtagtgtttaaaataattagttttgaggtagattgtttgtttttggattttgattttagtattttttatatatatgattaaggataagtttttttatttttttatattggtttttttatttgtaaaatggagatagtaatagtatttattttagagagttgttgtgagtattatacgaggtgtttagtatttggtatggtgtttgatatttaataaatattaaataaatttttgtttgtttttgtttgagacggagtttcgtttttgttgttaggttgtagtgtaatggtataatttttcgtttttttagtttaagtgatttttttgttttagtttttcgagtagttgggattataggtatgcgttattacgttcggttaattttgtatttttagtagagacggggtttttttatgttggttaagttggtttcgaatttttaattttaggtgattcgtttattttagttttttaaagttttgggattataggcgtgagttatcgcgtaaatatatagtttagttagaataatataagcgtatcgaagatatattttaatatagaatataataaagaataaaggtaaataaaattatttgagtaaagaaaaaaatataaaaaattaatatgaaaggagaattaataataaattaattattttttaaacgagagatatagaagagtagttgagatgaaattgtaaggatagagagagagtaagaggatagaaatgagtgaggaagatgggtagtatatagataaggatgagagttatagagcgtattaaattggatcgcgcgatttagttgaagaataaaataagaaagatgggggtggatttttttatttaaggagaataggaggcgtgtttgattgtatttattattatagggtatggtaggtggggagaatgggcgtttttagtggggggaggtggttattaggattaagtagggtagtcgggggtggttttatgattattatgaatattttttttgcgttttaatgttattatttatagttattatatgaatataagacgtagtttttttttaggttaatttaaggggcgggtatttgtaattttagtattttgggaggttaaggtaggtggattatttgaagttaggagtttgagattagtttgattaatatggtgaaatttcgtttttattaaaaatataaaaattatttgggcgtggtgatgtacgtttgtaaatttagttattcgggagggtgaggtaggagaatcgtttgaatttaggaggcggaggttgtagtgagttaagatcgtgttattgtattttagtttgggtaatagagcgagatttcgttttaaagaaaaaaaaaaaagaaagaaagaaagaaaaaagaaaattttttgttaatatatttttattgttttaattttataattttttgggtttttttagtatttatagaagttgataatagggaaaggtaggttgtaaagggtaatggtgatgagtttaggtagtattattgttttttttataaaagtatattaatgatgagtttggagaatatattagatgttaggatggtaaatatagttttggttgtaatatgatcgttgcgtaaaataaaatatatttatgtaagaggtttttaatttggagtttatgatttttttgaaattagatgtaaaatttggtttttgtgtgtattttttatggtagagggtttattgtttttgtttgatttataattttaaaatgttttaagtaagagggttaagaatttatgatttatttagtataatgttttttgagtgtaaaaagtttttgtggtatttagtattttcgtgggagtttattaaaattttagggtttatcgattgtagaattatggggatgtaaatgtatttgtaattttttggaagtaaagtatatacgggaaattaagaaatattaagagggaaaaagtattttagtttaatgggtataattgttgaggttttgaggtttttattaagaaggaaaagagagtttagattgtaggtttgttgcgagtaagtgtgtttgtaggttgtattaggtatgtggtgatggtgatggggggttataggagtttatagtgaatttttattatttttatttattattgtttagttattttattatttattgatttttttttttcggtagttttgaggatcgtagattaaattgaaatataaaaggggagggtaaaagaaaagatagttttaaagggagtcgagcgttcgtttttttattttgcggtttttttaagagaagaattttttgggatttgtagttttaatcgattttagttttaatcgaaatttaattcggattttttttttttgatttaaataagattaattttggatttttttttttttattgattaattagattttgttattaggtagattttagcggtcgtcggtacgagttcggcgttttttgttttcgggtggtagtagtgattaatgatagagtaggtcgttcgtgtatttaggtagatcgcggttgttataattatttagaaaaaggaaaataaagtaacgtacgagtcggttgggttaggattttggggttgggttggagtgaaggtggttacgaggtagttttttttttttttttatttttattgttgtttgtgttggaaggcgattgtttagaggtagggaggggtaagatgagttgggaggagagtagaaaaagattgtagttgtatttttaatagtttttttatttatgtgtacgtgttcggaatttgggattttatttttttgtcgggtttttgacgtttagcgtatgagtttcgttatttcgttttattttcgttttattttgtagaaatcggggattgaatggagggggaagggaaggaggtgggggcgcgttttaggatgggttgttgtgggagatgacgtaggggtcggcgacgtggggagggggagtagcgggggaagtcgtggcgagattaagtaatgagaatttgggtttagttttttttttaagtttagaagggtagaatatgttcgtattttttttgattttttaggtatatgtaatggtgaggagtatttttgagaattagagaattttgttttgtggttgttattgttgtttttgagggggaggagggtagtatggggttagaggtagaaatgaaaattttttgttaatatggatttttaatttttttatttttttttttatagttttttagatttaggagattttagaaaggtggggtagatagaatggagatggtaaagatttttttgggtatatatgggtttggcgaagtaatggaataatttttaattttcggagaaggtaagtggtgagaaaaagattatcggggaaattcggaggttttgtttttgtttttttgtttttttgggtaaagagatgaggagtgttttggggttttttggggaagggaaggttagtgtgagttatatttttatgtttgttttttttaattttagt

SEQ ID NO: 278 - DNA, 5179 bp, Artificial Sequence
  chemically treated genomic DNA (Homo sapiens)
gttagaattgagagggataggtataaagatgtaatttatattggtttttttttttttagaaggttttagggtattttttatttttttatttagaaaggtagagaaatagaaataaagttttcgaattttttcggtggttttttttttattatttgtttttttcgaaaattagaaattattttattatttcgttaggtttatatatgtttaaagagatttttgttatttttattttatttgttttatttttttgaagttttttaaatttggaaaattgtaaaggaagagatagggggattgggaatttatgttagtaagaaatttttatttttgtttttgattttatattgttttttttttttttaaaaataataataatagttataaaataaagttttttaatttttaaaaatattttttattattgtatatgtttgggaggttagaaaggatacgaatatattttgtttttttaggtttggaaaaaaaattgggtttaagtttttattatttaatttcgttacgatttttttcgttgttttttttttttacgtcgtcggtttttacgttattttttataatagtttattttgaggcgcgtttttattttttttttttttttttttatttaattttcggtttttgtaaagtggagcgggggtggggcggggtagcggaatttatgcgttgggcgttagaaattcggtaggggaatggggttttagatttcgggtacgtgtatatgggtgaagaagttgttgaaaatatagttataatttttttttgttttttttttaatttattttgtttttttttatttttgaatagtcgttttttaatataagtaataataaaggtaagggagaaagagaaattatttcgtagttatttttattttagtttagttttaaggttttggtttagtcggttcgtgcgttgttttatttttttttttttgaatggttgtaatagtcgcgatttgtttagatatacgggcggtttgttttgttattggttattgttgttattcggagatagaaggcgtcgggttcgtatcggcggtcgttgaagtttgtttggtaatagaatttgattggttaataggggagggaaaatttaaagttggttttatttgagttaagagggggaagttcgggttgggtttcggttaaaattggggtcggttgggattgtaggttttaagaggttttttttttaaagggatcgtaggatgaaagaacgggcgttcggttttttttggaattgtttttttttttgttttttttttttgtgttttagtttagtttacggtttttagagttgtcggaagagaagaattaatggatgataaaataattagataatgatgggtaggagtgatggaagtttattgtaagtttttataattttttattattattattatatgtttaatataatttgtagatatatttattcgtaatagatttgtaatttgggttttttttttttttttgatggaggttttaaaattttagtagttgtatttattaaattaaaatgtttttttttttttagtattttttggtttttcgtgtgtattttatttttaaagagttgtaaatgtatttgtatttttatagttttgtagtcggtgaattttggaattttgatggatttttacgggggtgttggatgttataggaattttttatatttagggaatattgtattgaataggttatgggtttttaatttttttatttaagatattttaaggttatgaattagataaaagtaatggattttttattatgaaaaatgtatatagagattaagttttgtatttaattttagagaggttatggattttaggttgaaagttttttatatggatgtattttgttttgcgtagcggttatgttataattaaaattgtatttgttattttgatatttaatatgttttttaggtttattattaatgtgtttttgtaaagaagatagtagtgttgtttgagtttattattattgttttttatagtttatttttttttattattagtttttatgagtgttgggggaatttaggagattgtggagttggggtaataaggatatattggtaagaggttttttttttttttttttttttttttttttttttttttttgagacggagtttcgttttgttgtttaggttggagtgtaatggtacgattttggtttattgtaattttcgttttttgggtttaagcgatttttttgttttattttttcgagtaattgggtttatagacgtgtattattacgtttagataatttttgtgtttttagtagagacggagttttattatgttggttaggttggttttaaatttttgattttaggtgatttatttgttttggttttttaaagtgttgggattataggtgttcgttttttgaattggtttgaaaagaaattgcgttttatatttatatagtagttgtgagtgataatattgggacgtaagagaagtgtttatggtgattatgaggttattttcgattgttttatttgattttagtgattatttttttttattgaaaacgtttattttttttatttattatattttataataataggtatagttaggtacgttttttattttttttgaatgaaaaaatttatttttattttttttattttattttttagttgaatcgcgcggtttagtttaatacgttttataatttttatttttatttgtgtattatttattttttttatttatttttatttttttgttttttttttgtttttgtaattttattttagttatttttttatatttttcgtttggaagataattaatttattattaattttttttttatgttaattttttatgtttttttttttgtttaaataattttatttatttttattttttgttgtattttgtgttgaaatatgttttcggtgcgtttgtgttgttttagttagattgtatgtttgcgcggtggtttacgtttgtaattttaaaattttgggaggttgaggtgggcggattatttaaggttgggagttcgagattagtttgattaatatgaagaaatttcgtttttattaaaaatataagattagtcgggcgtggtggcgtatgtttgtaattttagttattcgggaggttgaggtaggagaattatttgaattggggaggcggaggattgtgttattatattatagtttggtaataagagcgaaatttcgttttaaataaaaataaataaaaatttatttggtgtttattaggtattagatattatattaaatgttaaatatttcgtgtaatgtttatagtaattttttgaagtaggtattgttattgtttttattttatagatgaggaaattaatgtggagaggtgaagggatttgtttttagttatatatgtagaaagtgttagaattaggatttaaaggtaggtagtttgttttaaagttgattgttttgagtattgttttagattgtatgtatatatatttgtagatatttataaataaatatgggtataacgggttggatatgatggtttatgtttataattttaatattttgggaggtaaaggtaagaggattgtttggggttaggagtttgagattagtttgggtaataaagtgagattttgtttttttttaaatatatatatatatatatatatatatatatatagatatatatatatatattatatatagttaggtgtggtggtatatgtttgtggttttagtaatttgggaggttgaagtaggaggattattattatttatgagttcgaggttgtagtgagttatgattgtattattttgtcgtgtagtttgggtgatagagtaagattttgttttaaaataaataaataaataaaaaataaaaaaaaagtcggttggtgtggtggtttatgtttataattttagtattttgggaggttgaggtgggtagattatttgaggttagtttgagattagtttgattaatatggagaaatttcgtttttattaaaagtaaaaaataaaaaataaaataaaaaataaaataaaattagttagtcgtggtggtgtatgtttgtaattttagttatttggtaggttgaggtaggagaattgtttgaatttgggaggcggaggttgggtgagtcgagattatgttattgtattttagtttgggtaataagagcgaaattttatttttaaataaataaataaataaatagtaagttaaatatggatatagattgatggaaagatagttttaatattattgtttggtatgaaggagaatttagagtattttggttgtaaatagagttttgggtaagttatttagtttaaaaatttgtagataatagggaaaaattggaagttttagtaaggggggagaaagtattatagtatatagtatttagtaaaagagatgattttgatagtattatagaaggtagagttgagtgaaagaaaaggttagagataggaaagaggaaattattaatttatgttaggtattgtgttaagagttagggatataaagttgaataaggtatggtttttgttttgggtagtaataataaaaattgttcggataagtattatataatagtaagtatttatatagagtttaatatgtgttggggttcgtttttttttttttcgagacggatttttgttttgttatttaggttggagagtagtggcgtaatttcggtttattgtaagttttgttttttaggtttaagtgatttttttgttttagttttataagtagttgggattataggcgtttgttattatatcgggttaatttttttgtatttttaatagaaacggggttttattatgttagttaggatggtttttattttttgatttcgtgattcgttcgtttcggttttttaaagtgttgggattataggcgtgagttatcgcgtgcggttttagatagatattatgattatttttattttataggtgaggagataggtattgaaaggttaataatttgtttaagattatattataatttagtaagttatggagttaggatttgtatttaggttttttgcgttgtagtttttttttttttttttttttagatagagttttattttgttatttaggttgtagtgtagtggttttattgtatttggtttattgtaat

SEQ ID NO: 279 - DNA, 6204 bp, Artificial Sequence
  chemically treated genomic DNA (Homo sapiens)
ggttttattacgttggttaggttggttttaaatttttgattttaagtgattcgtttgttttagttttttaaagtgttaggattataggatgagttattacgttaggttttaagatttatttattaatatttaattaatttagttttaggtgagttttaggttagatgatagatgttgagattatgaagatagggtttaaggggtttaagtttttaggaatttatagtttaggggaagatgtttgttagtacgtggttagagagttagttagatttgatttttattttgagtttttatttagtttttagttgtgagattagttttgagttagttttttatttttttagttttcgtttttttaattgtaaaataagaattataatattatttttattgggttttggtgaggattaaatgagataatttatgtaaaatgtttagtatagtttttggaatatagtagtaattatttaattaatgttaattattgtttttttttaggaagtaggttaatatgtggatttattagaatttaaggtagagaatgtattttagatggggaaataatttgtcgaaggagtttggtaggagattaattttgttagtaagaatagaaggaagtttagaggaggtgatgttgtaatagggttttgaagaatgagtaagagtttttaggtagggattgaggaaagagattttaggtagaaggaagattatttatagaggtatgaagttgtagaaggtgtagatatgtttggaggaaggtaatatatttagtagggtttgtgggattaggttagaaaaggggggatttaggttagtttttgtggaatttattttttttttgagatagagttttattgtattatttaggttggattgtaatggtgtaattttagtttattgtaatttttgttttttgggtttaagcgatttttttgttttattttattgagtatttgggattataggtgttcgttaatacgtttggttaatttttgtatttttagtagagatagatttttattatgttggttaggttggttttgaatttttgattttaggtgatttattcgtttcggttttttaaagtgttgagattataggcgtgagttattgtgttgggtttgtaggattttatgatttaaataaagagggagaaagaaggaatattaattgagtttttattatatgtatggtattgaattatggtgttttttttttttttttttttttttttgagatagagttttattttgttgtttgggttggagtgtagtggtatgatttcggtttattgtaatttttgtttttcgggtttaaacgatttttttgttttagttttttaagtagttgggattataggtattcgttattatgtttagttaatttttttgtatttttagtagagacggggttttattatgttggttaggttggtttcgaatttttgattttaggattcgttcgtttcggttttttaaaatgttgggattataggtatgagttattgcgtttagttatggtattgaattaaatggttagttttttgtttattgtttgtttttgagataaggttggttttgttttgttgtttagattatagtatagtagaatagttatagtttattgtaatttcgaatttttttttaagtttaagtgatttttttgttttagtttttagaatagttgggattataggtatgttattattacgttcggttaattttttgtaaagttggtgttttgttatgttgtttaggttgatttcgaatttttggttttaaatgatttttttgtttcggttttttaaagttttaggattataggtatgagttattgtgtttggttagtatttttaaaatttaatttggattggtcggatacggtggtttttagtattttgggaggttgaggtgggcggattatttgaggttaggagtttaagattagtttagttaatatagtaaaatttcgtttttattaaaaatgtaaaaattagttgggtatggtggtgggtatttgtagttttagttatttgggaagttgaggtaggagaattgtttgaatttgggaggcggaggttgtagtgatttaggattatattatcgtattttagtttaggcgataagaggaaattttgttttaaaaaaaaaaaaaaaaaaaaattaatttggattttattttgtcggtagtagggaattatagagatttttaagtcgattgtgatatgattgaatttttttttttttttttttttgagttagggttttgttttatcgtttaggttggagtgtagtggagggatttgggtttattgtaatttttattttttgggtttaagtaatttttttgttttagttttttgagtagttgggattataggtacgtgttattatggttagttaatttttatttttgttttgagatggagtttcgtttttgttgtttaggttagaatgtaatggcgcgatttcggtttattgtaatttttatttttcgggtttaagagattttttttttttagtttttcgagtagtagggattataggtgtaagttattatgattggttgatttttgtatttttagtagagatagggttttattatattagttaggttggtttcgaatttttgattttaggtgatttgttcgttttagttttttaaagtgttgggattataggcgtgagttatagtgtttagtttaatttttgtatttttagtagagacggggttttattgtgttggttaggttggttttgaattgattttgtgatttattcgttttggtttgaatgtttatttatttaatttttaggatgatgtttttggtagttagtggaagaataggatagagtaaggagagaataattaggtggttaaggtagtggtttaagggatagaaattgtagtatttagttaagaggaatttggcggggttgtggagaaaggttagtgtttgggttgaagagaatttttgtaggttaaatttatagtcgtagaggtagattttatgtgttattggtggggaggttaatgagggaaatagaggttagtttttgagaagttagaagtagggtagggtttgaatgaatggaataaagttatgggacgtaaagtttttaaatttgattttgaatttggtatatttttgagtttttttgtgattttgaaaatgttatattatgttgtttttagttttttattagcggataatatggttttttttatttgttatttatgattgtgagaaagaaattaggtagggagtgtataaggtgtgtaagtgttttgtaagtagtaaattattaaataaattttagattttatgttattagggaggtagttggtcgtacgggatagcgtagttataagagattataggcggagatgggggatatttgttttgtggtgtagataaatagtttaattaatatatatatattttataggtaaatatagtaatttttatattgagttgtgtttattagagggtaataggaggtttttaatttttattattagtgattttatgaattgttttgtagatgtttttgttttttattggatatgaggtggtacgagcggtttgaatttgtagatttagataggttttaggtatttggggaattatgtgagtaaaattttgtattgtttttggggttagaatttagttttttttaaatatttagaaggatttgtgattgtttttaaaggttaagagttattgattttttttattagaaattaataagaatagttatttttggggagaaggaatgatgggggtagggaaagatttttatttaatatttttgatttttttgaacggtttgtattttttaaataggaatatgtattaggtttattgaaaaaaaatatgttagggttagttgagtagtgagataatgggttttttttagatttttgtttttatatttgttcgtattaaataaatataaatattaataatatatttttaaagatttaaaaaaataaaaattaaaaattttgatagtattagtatatatatagaaattattttattatgtaaagtttattttttattatgaaaggtaaaatgtttatattttttattaattattggttttaatttagtaaaatttgtatattaagtaggtaaggtggaaaagaaaaaggtagaatattttatgtattttaatttagacgtataaaaatgttaagttttatacgttattagttttcgtatatatcgttttttgtattcgtttgtacgggttaatgggttagttggtcggcgtttgatgtttgaagtgatggaacggagtacggggttaaatttattattttttttttacgtattttagtaattattttatttttacgttatgttttcgggtgtgtgtgtttttgtttacgtagaaattgaagtttaaagtaggcggagttatttatgttttttttgttgtttttagaatttaatttaggagttgggtttttagaggatttggagatatttggggattatttaattagttgattttcgcgtggtaagaggtttttaatttcgttattacgtggtgttaagggtcgggaaaagggagagcgggtaggagggagttgtattaggggtatttaaagtgttttgacgttacgtattgttaggaatttagttgagtttttagtaggatatttcggttatttttttttttttttttcgggtttttgtgtttaagttttcggtttttttttcgttgtggcggagggaggagtatcgaattgtcggaatagttagtataggggcgtattagtttttttttggtttcgtttttttttttagttgttttttttattggttagtgggcggggtttcggttgtatcgtatacgtattgggatttttgggtggtcgaacgagttggttttttatgaattatgtatgacggcgtgtttcggttaggttggggttgggcgaggattggttgaaggggttgtaatttagcggttttcggagttgcggcggcgtagattgggagggggagtcgggggtttcgacgtcgtagtcgagggaataagttttaatcggattttggataggtatttcggtttggcgttgtttttttttttcggttcggagaggtttttcggtttgagggagtttcgtcgttcgttttcggtatacgcgtacgttcggtttttcggtttttgtcggagaaataggtgaagggggtgtagggtggggtcgttggggaggtttggggattcgggggtttcgtagcggtagggggtttttgggattttggggatgttgtgatggacgttgtagtggggtcgggagagatgaagagacgcggagggtcgttttgagggaagatttttcgggatgataggagcgggtttcggaagggattcggggcgttggagggaagtttcgtttttcggagaaatagaacgcgttcgagggggtatcgtggggcgagggcgtattcggttgcggcggtaggagtgagggatagtttttcgattttttgttttttggggttttggggacgtttcggttatcggagcgattgttacgtcgacggggattatcggcgcgagtggggggtcggaaagcgtttttttttcgttcggtcggcggttttcgttgagttatttttttcgtttgttttgttttcgtttttttaggagttagttgtgtttttttggaggtaggaataggtgtgtttgtcgtttgtagttttacgggttggttggtcgtgggtaggttttattgtataagaattaagttttttgtagggaaattgatagatcggtattttttttaaattttttcgtatttttttttaggttaaattatgttttttttacgttttcgttttgtaaaaaagagaaaaaaagataaaataaaatttttattaattcgttaagttagttttagagagagaaataaattttttgatattgtttttttttaaatatttggtaaagtcggttagaagataaataattgagttattgtatttattggattgtggtgttgtttaattgtataggacggaatgaattaattgagagtgggagttttttgttttagagttaagattttgggtaaatgtagaggagagggaaataaagataggttggttttgaaaaaattatgtgtgtaaattttatatgtatttggggggtgtggttgtattgaagttaataagattta

SEQ ID NO: 280 - DNA, 6204 bp, Artificial Sequence
  chemically treated genomic DNA (Homo sapiens)
tgaattttgttaattttagtgtaattatattttttaaatgtatgtaaagtttgtatatatggtttttttaaggttagtttgtttttgttttttttttttttgtatttatttaagattttggttttgagatagaaaatttttatttttaattggtttatttcgttttatgtaattaagtaatattataatttagtaaatgtaatggtttaattatttattttttggtcgattttattaggtatttggaaaaggataatgttaagaggtttatttttttttttagagttggtttgacgggttgatggggattttattttgttttttttttttttttttataaggcggggacgtggggggagtataatttaatttagaaaaagatgcgagggaatttagaaagagtatcggtttgttaatttttttataggaaatttgatttttatgtaataaagtttatttacgattagttagttcgtaaggttgtaggcgatagatatatttatttttgtttttaaaagggtatagttggtttttgaaggagcgggaatagggtaagcggaggaagtggtttagcgggagtcgtcgatcgggcggggaggaggcgtttttcgattttttattcgcgtcggtgattttcgtcggcgtgatagtcgtttcggtggtcggaacgtttttagggttttagggagtaggaaatcgggggattgttttttatttttgtcgtcgtaatcgagtgcgttttcgttttacggtgttttttcgagcgcgttttgttttttcgaagaacgaaatttttttttagcgtttcgagtttttttcgaggttcgtttttgttatttcgaagagtttttttttagggcgatttttcgcgtttttttatttttttcggttttattgtagcgtttattataatatttttaaggttttagaggttttttgtcgttgcggagttttcgggtttttaggtttttttaacggttttattttgtattttttttatttgttttttcggtagaggtcgagaggtcgggcgtgcgcgtgtgtcggggacgggcggcgaggtttttttaggtcgaagggttttttcgagtcgagggggagagatagcgttaagtcggggtgtttgtttaggattcggttggggtttgttttttcggttgcgacgtcggaattttcggtttttttttttagtttgcgtcgtcgtagtttcggaaatcgttgaattatagtttttttagttaattttcgtttagttttagtttggtcgaggtacgtcgttatgtataatttatgaaaggttagttcgttcggttatttagaggttttagtgcgtgtgcggtatagtcgaagtttcgtttattgattaatgaggagagtagttaggagaaagggcggagttaagaggagattgatacgtttttgtgttggttgtttcgatagttcggtgttttttttttcgttatagcgagggaagagtcgaggatttgggtatagaagttcggggggagggagggaagatgatcggaatgttttgttgaaaatttagttgagtttttggtagtgcgtgacgttaaggtattttaaatgtttttgatatagtttttttttgttcgtttttttttttttcggtttttggtattacgtggtggcgaggttgagagttttttattacgcgggaattagttagttagatagtttttaggtatttttagattttttggggatttaatttttgaattgggttttggggataataaaaagaatatgggtgatttcgtttgttttgaattttagtttttgcgtgagtagggatatatatattcggaaatatgacgtggaaatagagtaattattagagtgcgtggggagagggtagtggatttaatttcgtatttcgttttattattttaagtattaaacgtcgattagttagtttattggttcgtataggcgaatgtagaagacggtgtatacgaaagttgataacgtgtagggtttgatatttttatgcgtttgaattgaaatatatgaaatgttttgttttttttttttttattttgtttatttggtatgtaagttttattgaattgaagttagtggttgataggaaatgtagatattttgttttttataatagaggatgaattttgtataatggagtgatttttgtgtatgtgttgatattattagggtttttaatttttatttttttgggtttttaaaaatatgttattaatatttgtgtttgtttaatacgaataggtataaagataaaaatttaaaaaggatttattattttattgtttagttaattttgatatatttttttttaatgaatttaatatatgtttttgtttagaaaatgtagatcgtttagaaaggttaaaaatattaaatgaaaatttttttttatttttattattttttttttttaaggatagttgtttttattaatttttagtgagaaaaattaatgatttttaatttttgaaggtagttatagatttttttgagtgtttgaaggagattagattttagttttagaaataatataaggttttatttatatggttttttagatatttgaagtttgtttaagtttatagatttagatcgttcgtattattttatatttaatgagggatagaggtatttatagggtaatttatagggttattggtggtgagaattgagaattttttattgttttttggtagatatagtttagtatggaaattgttgtatttatttgtagagtgtgtgtgtattgattaggttgtttatttatattataggatagatattttttattttcgtttatagttttttgtaattacgttatttcgtgcggttaattgtttttttgataatatagggtttaggatttgtttagtgatttattgtttataaagtatttatatattttatatattttttgtttggttttttttttataattatgaatagtagataggagaggttatattattcgttgatagaaaattaaagataatataatatgatatttttaagattatagagaaatttagaaatatattaggtttagagttaggtttgggggttttacgttttatagttttgttttatttatttaaattttgttttgtttttgattttttaagagttggtttttgttttttttattggtttttttattagtaatatataaaatttatttttgcgattatgggtttgatttgtaaaaattttttttagtttagatattggtttttttttataatttcgttaaattttttttggttaaatgttgtaatttttgttttttgggttattgttttaattatttgattattttttttttattttattttatttttttattggttgttagggatattattttaaaaattaaataaataaatatttaggttaaggcgggtggattataaggttagtttaagattagtttggttaatatagtgaaatttcgtttttattaaaaatataaaaattaggttgggtattgtggtttacgtttgtaattttagtattttaggaggttgaggcgggtagattatttgaggttaggagttcgagattagtttgattaatatgatgaaattttgtttttattaaaaatataaaaattagttagttatggtggtttgtatttgtaatttttgttattcgggaggttgagggaagagaattttttgaattcgggaggtgaaggttgtagtgagtcgagatcgcgttattgtattttagtttggataataagagcgaaattttattttaaaataaaagtaaaaattagttagttatggtggtacgtgtttgtagttttaattatttaggaggttaaggtaggagaattgtttgaatttaggaggtggaggttgtagtgagtttagatttttttattgtattttagtttaggcgatagagtaagattttggtttaaaaaaaaaaaaaaaaaaaaatttaattatgttatagtcggtttaaaaatttttatggttttttattatcggtaagataaaatttaagttaatttttttttttttttttttttgagatagagtttttttttgtcgtttaggttggaatgcgatggtatgattttgggttattgtaattttcgttttttaggtttaagtaatttttttgttttagttttttaagtagttgggattataggtgtttattattatgtttagttaatttttgtatttttagtagagacggggttttattgtgttggttaggttggttttgaatttttgattttaagtgattcgtttattttagttttttaaagtgttgggagttatcgtgttcggttaatttaagttaaattttaaaaatgttgattaggtatagtggtttatgtttgtaattttaaagttttgggagatcgaggtaggaagattatttgaggttaggagttcgagattagtttgggtaatatggtaaaatattaattttataaaaaattagtcgggcgtggtggtggtatgtttgtagttttagttattttgaggattgaggtaggaggattatttgaatttagaaagaagttcgaagttatagtgagttatgattgttttattgtattgtagtttgagtaatagaataagattaattttgttttaaaaataaataataaataaaaagttgattatttaatttagtgttatggttgggcgtagtggtttatgtttgtaattttagtattttgggaggtcgaggcgggcgaattttgaggttaggagttcgagattagtttggttaatatgatgaaatttcgtttttattaaaaatataaaaaaattagttgggtatagtggcgggtgtttgtaattttagttatttgggaggttgaggtaggagaatcgtttgaattcgggaggtagaggttgtagtgagtcgagattatgttattgtattttagtttaggtaataaagtgagattttgttttaaaaaaaaaaaaaaaaaagaaaaaaatattataatttagtgttatgtatgtggtaggagtttaattgatgttttttttttttttttttttatttgaattataaaattttataggtttagtatagtggtttacgtttgtaattttagtattttgagaggtcgaagcgggtggattatttgaggttaggagtttaagattagtttgattaatatggtgaaagtttgtttttattaaaaatataaaaattagttaagcgtgttggcgggtatttgtaattttaggtatttagtagggtgaggtagaagaatcgtttgaatttaggagataaaggttgtagtgagttaagattgtattattgtaatttagtttgggtaatatagtgagattttgttttaaaaaaaagataaattttataaaggttgatttgaatttttttttttttaatttagttttataaattttattaaatgtgttatttttttttaaatatgtttatattttttgtaattttatgtttttgtggatagttttttttttatttggaatttttttttttagtttttatttgagaatttttatttattttttaaagttttgttgtaatattattttttttaggtttttttttatttttattggtaaagttaattttttattagattttttcggtaggttgtttttttatttagaatatattttttattttgaattttaataaatttatatattggtttattttttgaaaaaaaataataattaatattgattaagtaattattattatattttaggaattgtgttaagtattttatatagattattttatttgatttttattagaatttagtgagggtaatattataatttttattttataattgaggaaacgaagattgagaaagtgaaagattggtttaagattggttttatagttagaaattaggtggaaatttagaatgaaaattaggtttggttgattttttggttacgtgttaataaatatttttttttaaattgtgggtttttggaaatttgaattttttaagttttgtttttataattttagtatttattatttagtttagagtttatttaagattgaattaattaaatattaataaataagttttgaggtttgacgtggtggtttattttgtagttttagtattttgggaggttgaggtaggcggattatttgaggttaggagtttgaaattagtttggttaacgtggtgaaatt

SEQ ID NO: 281 - DNA, 9504 bp, Artificial Sequence
  chemically treated genomic DNA (Homo sapiens)
gttattattattagagagattttttattgtttttagttttttgtattatttatttttgatttaaattgtaggaaggttgtatttgattagttaaatagaatatatgtttttgttttaagtataaggaagattaagaaagagaatatttttaatttttatttttattgaatattatgttgtgttttttagatttttttttaggattgaagaatgtatttttttagttgttgggagtgttgttgttagtagtttttttagatagtttttatttttagtttttttttagaaattgtttttagttggaaagaattatttggtttaaggttatgattttattataggataagttttaattagatattggttttttgattataaagtttgggtagggaatattgagatgggaattggggtggaaagtgttattaaattggattggtatttttatttttttgaagtaggaggttattatttttttggatttgatttttatttttttttttaatgaagggtttggggaggtataatggtagtgggtaggtagtgtttttatattaatgggaattaaagtgatattagtatggtgttatttatttttattattgtagagtttacgattttttttatattgggtagagggtttggtatagtttttttggaagatttttaaggaaattaaaattattgtagtaaggtagagttaatattagttttattatgttagagagtgggagacgttttatgtgtttttaataagtttttgttattttattgttagtttgagttgttttttttttttgttgttatattatttttattggtatttggaaatttttttaaaatgtttttttggtttggggttattatatagtttatttgtatggttaatttaattgttgagtgtttggttttatgtttttgaatagttatgtaggaattttatggtggattgagttattattgggtaaagattggatttttgtataaatttggatgatcggataatgtatataaataggtattttagatttttttaatattatatatgtaaatgtgagtgattgagataggatattgaataattatagataaaatttaagtttttttttaaatatgttttataggaggtaattattaaagtgaaaattgttttgaagagtattaggttttggtaatggagattatattggtaaatgtgggatggttttttttagtttatttttatagtaaggatgttttcgagttgtatagatttgttgggaataatataattattttaaagatatttaggtaatatttaaggtatttttttagtatttagatttttttttaattgtttaatgttaatatattattatttttaaggttatagattgatttgttataaatagttttgtaggttaggaatatattgaattgttttagatggtatttagtggttttttgttattaatttttagttttggttttttttggggtggtttggatgattttagaatttttggtattatttttgtattttttaatgagtttatttggagaggttagtggagtagatttgtttttttttggtgggattatttattgattatatttgtgtttttaggaggtttttttgatattgtgtagaagttggaagttttttagagatttgtttttatagttttgaataatattaaatatggtatggaggttttgaatattgaaatagttgtagtgaaaaaagtggtttataaaattaaatggttttagagatgttgatatttgtgtaagggggaatttgtgttttttataaaagtgaatattgtgtgtatattttagataaagaagttgaagttaattaattcgttttttatttacgaaagtaattatagtttattgattatatagggtatgtttggtggtttatataaagttatgttttttaggatggggtttttggtggaaagttttgttaggaagttttttggaaaatgtgattttagattttgttaggtgtatttgtatttattgttagtgtaggttttgtttgtagtgttttataaagttaggggaaagaaattgtcgatgattttattttttttgattagtttagggaatatataggaagagatgggtatgtgagattgtaagagttagttaggaaaatggattgtaggatttttgattggaaattatagagttttgattattttgtgattgaaaattagagtgttttgatttttttgtgatttagttagttgtagatttttttttagtatgtttgaatttaaatttgggttttgaatatttttaggtattgataaaggtatttaagttgttattgaaaatagtgaaagaaattagttttggttttgagttaaattttttaaatttttatataaattttatattttgatttttttattgtagatatatttaggtagaatgtttttttttttttattatttatggggaggatttttgtaatattatgtaagtttttttaataaatgttttggatagattattttggtatatagtgtttttttttttggaattttaattagttttaattaggacggttttgggtatttttttgtgtgaatttttttgttattatttttgggggataaaatagtatatatttaatagaattattttgttaaaaagtaagggaataataaatataaaatttgtgatagtgttttttcggatgagaggtagtatagagagggattagaaaaagagtagtattaaatttaagttgttgttaatttatagtttttatagattaggtaatggattaaaaaatgtttatattttaaggttatgtatggattaatgatagttagtggttttaattaatattattttgaatatttgagttttattggggtaaggggatgaattaaataaggttttagaagaaaagttgtttgggaatgtaggaaggttttgtagaggagatgaagttttagttgtaattttgttgcgtgggttttaattttattatttgagatttaaatagaggtaggagttatttaggttagaatgtagtggtgtaattatagtttattattgtagttattattttttgggtttaggcgatttttttattttagtttttcgagtagttgggagtataagtgtattttataattttcgattaattttttttttttttaatttttgtagagacgaggttttaattatgttgtttaggttggtttcgaatttttgagtttaattaatttttttgtttttgttttttaaagcggggaattagaaaagtgagttaatacgttcggtttattagtgttaaaaaataaaaataaaagtaataatttgatagatagagttagggagggttatgaagagatattttttaggtttgtatgttttataagaaaattattatatatgattgtaaaatttattttatattaaaaatatttttgtaaggatattcgtttagtaattgtttgtttaattttagattggtgttattttcgttatcgatttttgtagttaagaataatgattttaaaataattaaataattttttttattttttttttaaaaatttttgtttttttttatttttttgaatagaaatatagtttattttggtacgtttatttttattgtaattttttattttcgaataaatttttttttttttttttgagatggatttttgttttgtcgtttaggttggagtgtagtggcgtgattttagtttattgtaatttttattttttgggtttaagcgatttttttgttttagttttttaagtagttgggattataggcgtttattattatatttagttaatttttatatttttagtatagacggggttttattatgttggttaggttggttttgaattttttgttaaatatagtgagttttaaatttttttttaaagaattagtatgttagtatgtttaattttttgttttttattttaaattttaatttttttatttttttcgtttttttgtttttagttttagtaaataattttttttattagttttaattagtagtttatatttgtttttttggtgatttgtttcgttttgagttatttttggttatttgttttgatttgagttatttttagttatttgtttcgtaatcgttttttttattgaaattgtttattttattatttcggtttatatttttgttttttttaaaatagttaatcggaattaatttagattgtgcggtttaattttagttagtaggggaacgatatagtattagggattatttgcgttagggataagaattttttttttttttttgtttaggtgtgttttcgttattgttttattcgtgagacgtatttttttatagaagtaaattgttttgttgagaaaatgtgtgttcgagtgtgtattttttttttttttttttttttttgagattgagttttattttgttatttaagttggagtgtagtggcgcggtttcggtttattgtaagtttcgtttttcgggtttaagcgatttttttgttttagtttttcgagtatttggaattataggcgcgtgttattacgttcggtaatttttttttttttttttttttttgtatttttagtagatatagggtgttatcgcgtaaattaggatagtttcgattttttgatttcgtgattcgttcgtttcggttttttaaagtgttgggattgtaggcgtgagttatcgcgttcggttaacgttattttttttttaggagttttttttgttatttagtaagatatattattataatggagaaaaaagatgtttttttttttaagttttgagatttttaggattttggcgaaaagtttgcgttcgaagagatttaggaaggatttttggaattgtagtttaaaggtatttcgttttttgcgtagatttataagtttttgtggacggaatttttgaagtgtagcgtcgtttagtttttttatcggaagtgttcgatcggaattagttttgttcgagaggtgagttcgggtttggggatttagatgtttagtttcgtgtttttttttaaatatttagttttttttatattgtttttgaaattagtagtttttgggtgattagattttggtttttagaggaatttcggagaaaggtagaattagtttcggcgttgggaacgtaggcgcgtttacgtatttagtgagggtttggcggtttttatagttatcgtcgtcgcgcgtgacgttatagtggagcgttgagggtttggtggcgtggggtgggggttgttttattgattttgaatttggggttattggtaagaggagttgtttattttagttaggtggaacggggaggggtgttatatgttttagatttgttattgtttgcgaaaagaaattgttgcgaggattatttttaattttttgttttttttgggaagagtaatcgtcgttttgtaggatatttggggataatttcgtttgttttgaaatttattgatacggtaaatagtattttttgtgtgtcgaggatgtagttaaattaatattgattttttgtttttgagaaatataaggtattatgggagtttttattagtatgttttttgaagtttttgttttgttttgtggtttttatcggattttttttgattgtttttttttttattaataaaatttttattcgtttttttttttcgtaatatgtttattaagatatgtttatttattaggagttttgttttttaatttttaatttttttattataattaattattcgtttttttttgtttttttagcgtttttttatatatttgtttatttatttttgtaagtttttttaatataatattataaggtattagatgtttaattaatatttattagtttaaagttattagttttagggggattcggttttaaatagatgagaagtgataaaatatttggagatagtattgttagttgagataatatgttatagaattagttgtttagtataattgaaattttattcggattatatgggtttattttatatttattttattatggtaaatgagattatgtttattaagtattaggatattatttggttagcgtatttaggaaatataattagaaatattaaagaaatggtttagtaaaatataagggattgagattttttggttaatatattatggaattaattttttttttttttttttattattgataaattttgtttttatttatatttaaattgtttgttttttaaggtttagtttgaatttagtgatatttattttatatttttggagaattaatattgttatatatttttaattattttttttatgaattttgtttgttaagataagttcggttatggagattttaatttagtggcgttagaggaattaaagatatatatagaaatatagagtgtggagtgggaaatgaggggttttatagtttttagagttgagagttttgaatagagatttatttatttatttattgatagtaagttagtgataagatttattgaaagtattttttacgggaaataaagggatgggtcgaaataaagggatgggttttggttagttatttgtagtatgaatatgtttttaaggtatagatcgtttatgttattgttttttgttttgggtgggttaggtgttttttgtttttattttagtaaattgataattttttagcgtgggcgttaaggttattatgagtatgttatagtgttgtagagattttgtttatggttagttttggggttagtttatggttagatttgggggtttgtttttaatatttgttaaaatttgtttttttattttaaatttttttttattattgaaatattattgtttttgttggaaatatttttttaagtagatgttttattattattttaaatatagattatttaaaatagaagttatttgaaatttttttaatttttttttttaattataaatatgaagttttaagaataattaataatgtatgatttttaattttatggaatattaattagttgataaaaaaatagttaaataattaaaaataatataaggatttatatatttatatgtgtatgtgttaggaattgtaagaatttagattagagttgagtaattttttaatagaggtagtagaatttttagttattttagttattatattttgtaagttgattttattattagtttgttgtttatttttattttttttattttgttttttttttttttgaattttttttattttttattgtttaatttaagttttatgttaaatatagtgagttttaaatttttttttaaagaattagtatgttagtatgtttagttttttgttttttattttaaagtttaattttatttttttgtttttagttttagtaaataattttttttattagttttaattagtagtttatatttatttttttggttatttgttttgttttgagttatttttggttatttgttttgatttgtattatttttaatcgtttgttttgtaatcgttttttttattgaaattgtttatttcgttattgtggtttatatttttgttttttttaaaatagttagttggaattagtttagattatgtagtttaattttagttaataggggaacgatatagtagtagggattatttgcgttagagataagaattttttttttttttttgattaggtatgtttttattattgttttatttgcgagatatatttttttatagaagtaaaattgttttgatgagaaaatttatgttcgagtgttattttttttgttgtatcgaaaatttatttttaatatttattatttttaggaaatattttttattatttatagtttttttttattttaggatcgttagaatatttagtatttttattataaatttattttatattttaatatttaatatttaataaatatgtataatgtatatgttatgtgaaacgtttttttatttaaattttttgtatttatgttttataatttttttttaattagttttttttattgaatttatttttttttttttcgtatttttgttaaattttttttattttttaaatttaaagattttttgtttaatttattaagttgtatattagaatatagattttttaggtatatattatattgattaagttattatttttaggagtaggtttttagtttgtatttttagaggtagggtttaagaatttgtttttattaaagattttatatgatgattaggtagtaagtttagtgttatatttagatttttttgtaaattattgttgtataatttttagtttaatgttttgtttgtgataagatttttaataaaatgtgtgttattgtattagttagtagttaatttagtgaaatgtttagtaaaagaattttaggtcgggtacggtggtttatatttgtaattttagtaatttgggaggttgagatgggtagtgggtagattataaggttaggagtttgagattagtttggttaatatggtgaaattatatttttattaaaaatataaaaaattagttaggtgtggcggtgtgtatttgaaattttagttatttaggaggttgaggaaggagaattatttgaatttgggaggcggaggttgtagtgagtcgagatcgcgttattgtattttagtttgggtgatagagtaagatttttttttaaaaaataaaaaaaagaattttatatttgtatgaatatagtggtttttatttttttatattgttatttattttagaaatgaagaatatatttatttttatagtgtttagtaggttattttgtttagaagaattgatttttttttagtgattttttagtgtttaaaagataaattttaaatttatgaattttatagttgatgttttttataataatatttttaagttttgtttttataatttttttatataaatttattaaacgttttgtttttttttttttgtatttttatttttatttaattgtttagattgtttttttgttcgtaattttttattttttttttttttatattttagttaaattttttttattttttagaattttatgtttgtattaagttttttttgattattgtaattatttgtattttttttattttttattttatgaagtatttttattattttttttttttatttttattttttttgtgatttttaaaatttaataatatgtatattgttaatatttagtattatatttaagtttattgtttttaatttattttatttttaaatttaaaaattaagttattttgaagtagaaattattaatagttgtattttagaaattaagtatgttagtgtttttgtatatagtaaatgtttagtaaatttttgtgtaatggagaatgacgatttttattatgtggttttttatttttttagatagtaatagtaatttttgattttttaggaggatttttgaaattaaagaagattttttttaaagtagttttgataatatattttatttataga

SEQ ID NO: 282 - DNA, 9504 bp, Artificial Sequence
  chemically treated genomic DNA (Homo sapiens)
tttgtggatagaatatattattagaattgttttggaaagggttttttttagttttaagagtttttttgagggattaaaagttattattattgtttaagaagatgaaagattatataataaaaatcgttattttttattatataaaaatttattgggtatttattatatgtaaaagtattgatatatttggtttttagaatataattgttaatgatttttattttaagatagtttaatttttaaatttaaaaataagataaattagaaataataaatttaaatgtaatgttaaatattaataatgtatatgttattaaattttaaaagttatagagaaaataaggataaaaaagaaaaatgatagaagtgttttataaaataggagatgagaaaaatatagatggttgtaatggttaagggaagtttaatgtaaatatgaaattttgaagaatagaaaagatttgattaggatgtgggagggaaagaaataggaaattacgaatagagaaatagtttgaataattgggtaagagtaggaatatagaagagggaaagtaaaacgtttagtaggtttgtataagaaaattatagaggtaaagtttggagatgttattgtagaaaatattaattgtgaagtttatgaatttggagtttattttttaggtattggggagttattgaagaggagttaatttttttgagtagaatgatttgttaaatattgtggagatgaatatgttttttatttttagggtgggtggtaatatgaaaagatagaggttattgtatttatgtaagtatgaggtttttttttttgttttttgagagggagttttattttattatttaggttggagtgtaatggcgcgatttcggtttattgtaattttcgttttttaggtttaagtgattttttttttttagttttttgagtagttaggattttagatgtatatcgttatatttggttaattttttgtatttttagtagagatgtggttttattatgttggttaagttggttttaaatttttgattttgtgatttgtttattgtttattttagttttttaaattgttgggattataggtgtgagttatcgtgttcggtttgaggtttttttattaaatattttattaagttgattattgattgatgtaataatatatattttattaagaattttattataagtaaagtattgggttagaagttgtatagtaatggtttataagaaagtttgaatatgatattgggtttgttgtttaattattatatgggatttttggtagaaataggtttttgggttttatttttggagatgtagattaggggtttgtttttagagatggtaatttggttagtatagtatatgtttggaaaatttgtattttaatatatagtttaatggattaaataaaaagtttttgagtttgaagaatagaaaagatttgataaggatgcgggagagaaagaaataaatttagtgggaagaattagttgggaagaaattataaaatatggatataaaagatttaaatgagaaaacgttttatatgatatatatattgtatatgtttgttaaatgttgaatgttgaagtataaaatgagtttatggtggagatattgaatgttttaacggttttgaggtgggaagagattgtgaatggtagaaggtattttttagaggtggtgggtattagaaataaattttcggtgtagtaaaagaaatagtattcgaatatgaatttttttattaaggtaattttgtttttatagaaaggtgtgtttcgtagatggagtaatggtgagagtatatttgattaagggagaggaaggggtttttatttttgacgtaggtagtttttattgttatgtcgtttttttattggttagggttggattgtatagtttaagttaattttaattggttgttttaaagaaagtaggggtatgaattatagtggcggggtgagtagttttagtgggaaggacggttatagaataggcgattaaaggtgatgtaggttagagtagatgattaggggtgatttaggatagagtaggtgattaggggaatagatgtgaattattgattggaattggtggaaaaggttgtttattgaaattaggggtaaggagatgaggttaaattttaaagtggagaataaagaattgaatatattgatatattgattttttgaagagaaatttagaatttattgtatttaatatggggtttaaattggataataaaggatgagaaagatttagaaaggaaaggaatagagtagaggaagtaggaatgagtagtagattgatggtgagattaatttgtagggtgtgatggttggagtgattaagaattttattgtttttgttaagaaattgtttaattttagtttgagtttttataatttttaatatatatatatatgaatatataagtttttgtattatttttagttgtttggttgtttttttattaattgattgatgttttatgaggttaaggattatgtattattaattgtttttaaggttttatatttatgattgaaaggaaaaattaggaaagttttagatgatttttgttttggatgatttgtatttaagatgataataagatatttatttggaaaaatatttttaatagaaataatgatattttaataatggaaaagaatttggaatgggaagatagattttgataagtgttgggaataggtttttaaatttggttataaattggttttaaaattggttatgaataaaatttttgtagtattgtgatatgtttatgatggttttgacgtttacgttggaaggttgttagtttattggaatgagggtaaggaatatttggtttatttagggtagaaaataatagtatgagcgatttgtgttttaaggatatgtttatgttgtagataattagttagagtttatttttttatttcggtttatttttttatttttcgtaaggaatatttttagtaaattttattattggtttgttgttaataaataagtgggtaaatttttgtttaaggtttttagttttgaaggttgtgagattttttattttttattttatattttatatttttgtgtgtgtttttaatttttttagcgttattgggttagggtttttatgatcgagtttgttttggtagataagatttatgaaaagggtagttgaagatatgtaatagtattaattttttaagagtatgaaataaatattattaggtttagattgaattttggaaaataaataatttgagtataagtaagaataaaatttattaatgataaagaaaaaaaaggggggttagttttatggtatattaattagagagttttaattttttatattttattgggttatttttttgatatttttggttatgttttttagatgcgttaattaagtagtgttttaatgtttaatgagtatgattttatttattatagtaagatgggtgtaaagtaggtttatataattcgaatgaaattttaattatgttgagtagttggttttatgatatgttattttagttgatagtattatttttaggtgttttattattttttatttatttaaaatcgagtttttttaaagttggtagttttaaattaataaatattgattgagtatttagtgttttataatattgtgttaggaggatttataaaaatgggtaagtagatgtgtgaagaaacgttaggagaatagagaggaacgagtaattaattatgatgagaaagttggaggttaaagagtagggtttttgatggatgaatatgttttggtgggtatgttgcgggaggggaagacgggtgagagttttgttggtggagagggagatagttaggggaaattcggtagagattataaagtagaatagagattttaaggggtatgttggtaaaggtttttatagtattttgtgttttttaagggtagggggttagtgttggtttaattgtattttcggtatataggaaatattatttatcgtgttaataaattttaggataagcggggttgtttttaagtgttttataaaacggcggttattttttttaagggaagtaggggattggggatggttttcgtagtagttttttttcgtagataatggtagatttgagatatgtggtattttttttcgttttatttggttggaatgggtaattttttttattagtgattttaaatttaggattagtaggatagtttttattttacgttattaagtttttagcgttttattatgacgttacgcgcggcggcggtaattatggagatcgttaaatttttattaaatgcgtaagcgcgtttgcgtttttaacgtcgaagttggttttattttttttcgggatttttttgagggttaaggtttggttatttagaggttgttaattttaaaggtaatatgagagggattggatgtttggagggggatacggggttggatatttggatttttaaattcggatttatttttcggatagggttgatttcgatcggatattttcggtggaaggattgagcggcgttatattttaagaatttcgtttatagggatttgtgagtttgcgtagaaggcgggatgtttttggattataattttaagaattttttttgggttttttcgggcgtagatttttcgttaaagttttgaagattttagggtttgaaggagggggtattttttttttttattgtagtagtgtgttttgttaaataatagaagggatttttgaaaagaaaatgacgttggtcgggcgcggtggtttacgtttgtagttttagtattttgggaggtcgagacgggcggattacgaggttaggagatcgagattattttggtttacgcggtgatattttgtgtttattaaaaatataaaaaaaaaaaaaaaaaaaaaaattgtcgggcgtggtggtacgcgtttgtagttttaggtgttcgggaggttgaggtaggagaatcgtttgaattcgggaggcggagtttgtagtgagtcgagatcgcgttattgtattttagtttgggtgatagagtgagatttagttttagaaaaagaagaagaagaaaaagatatatattcgagtatatatttttttagtaaagtaatttatttttatagaagggtgcgttttacggatggagtaatggcgagagtatatttgaataagggaggggaaggggtttttatttttgacgtaggtagtttttagtgttgtgtcgtttttttattggttagggttggatcgtatagtttaagttaatttcgattggttattttaaagagagtaggggtatgagtcggagtggtagggtgagtagttttagtgggaaggacggttacggaataggtgattaaaggtgatttaggttagagtaggtgattaggggtgatttaggacggagtaggttattaggggaatagatgtgaattattgattagaattggtggaaaaggttgtttattgaaattagaggtaaggagacgaggaaaatgaggaagttaaagtttaaaatggagaataaagaattgaatatattgatatattgattttttgaagagaaatttagaatttattgtatttaataaggagtttaaggttagtttggttaatatggtgaaatttcgtttgtattaaaaatataaaaattagttgggtgtggtggtgggcgtttgtagttttagttatttgggaggttaagatagaagaatcgtttgaatttaggaggtgaaggttgtagtgagttgagattacgttattgtattttagtttgggcgatagagtaaggatttattttaaaaaaaaaaaaaaaagtttattcgggaataggaaattgtaataagaatagacgtgttagagtaaattatgtttttatttagggaggtaaaggaagataaaggtttttaaaggaagaatggggaggattatttaattgttttgaaattattatttttgattataaagatcggtaacgaggatgatattagtttgaggttagataaatagttgttgggcggatgtttttgtagaggtatttttggtgtaagatgggttttgtagttatatgtgatagtttttttatgaggtatataagtttgagaagtgtttttttatagttttttttggttttatttgttagattattgtttttgtttttattttttaatattagtgggtcgggcgtgttggtttatttttttaatttttcgttttgggaggtaaaggtaggaggattaattgaatttaggagttcgagattagtttgggtaatatagttgggatttcgtttttataaaaattaaaaaaaaaaaaaattagtcgggggttgtggaatgtatttgtatttttagttattcgggaggttgaggtgggaggatcgtttgagtttaggaggtggtggttgtaatagtgagttgtgattgtattattgtattttagtttgagtgatttttgtttttatttaaattttaggtggtgaaattgaagtttacgtagtagggttgtaattgaaattttattttttttgtaaaatttttttgtatttttagataattttttttttgaggttttgtttgatttatttttttattttagtggaatttagatatttaaaatggtattaattaaaattattggttgttattggtttatgtatggttttaaagtgtgaatattttttaatttattatttagtttataagaattgtagattgataataatttagatttaatattattttttttttagtttttttttatattattttttattcgaggaaatattattataaattttgtatttgttgtttttttgttttttaataagatgattttattagatatgtattgttttgttttttaaaagtggtggtaggggagtttatataagggagtgtttaaaatcgttttagttggggttggttgggattttaaagaaaggagtattatgtgttaaggtgatttgtttaaagtatttattaagggaatttatatagtgttgtaggaattttttttatgggtggtgagagaaaagggatattttatttagatatgtttgtagtgagggggttagggtatggagtttatataagggtttaaagaatttggtttagggttagagttagttttttttattgtttttagtgataatttagatatttttattagtgtttgggaatgtttaagatttaagtttgggtttaagtatgttgggaaaaaatttgtagttggttaggttatagagaggttaaggtattttgatttttagttatagaatagttaaggttttgtgatttttagttagagattttgtaatttatttttttgattggtttttataattttatatgtttatttttttttatatgttttttgagttggttagaaagggtgggattatcggtaattttttttttttggttttatgaaatattgtaaataaaatttatattaatagtaaatataagtgtatttgataaaatttaaaattatattttttaaaaggttttttagtagagttttttattaaggattttattttggaaaatatgattttgtgtagattattaggtatattttatgtggttagtaagttgtaattgttttcgtgagtgaaggacggattgattaattttagtttttttgtttagaatatatatataatgtttatttttgtaaagggtataggtttttttttgtatagatgttagtatttttagggttatttggttttgtagattattttttttattgtagttgttttaatgtttaaggtttttatattatgtttggtgttgtttaaagttgtggagataaatttttgaagggtttttagtttttatatagtattagaagaattttttggaggtataaatatagttaataagtaattttattaagaaaaaataggtttattttattgatttttttagatggatttattgagggatataggaatggtgttagagattttggagttatttaagttattttaggggaagttagggttggaggttagtagtagagagttattgggtgttatttggggtaatttagtatatttttggtttataagattgtttgtgataaattaatttgtgattttaaggataatggtgtgttggtattgggtaattgggaggaaatttaggtattaggagaatattttaggtattatttgaatgtttttagagtgattatgttgtttttaatagatttatgtaattcgagagtatttttgttgtaaggatgagttaaagaaagttattttatatttgttagtatgatttttattgttagaatttggtgttttttagggtagtttttattttgatggttgttttttatgggatatgtttagggaaaaatttaaattttgtttgtagttgtttaatgttttattttaattatttatatttgtatgtgtggtgttagaggaatttagggtatttatttatatgtattgttcggttatttaagtttgtatagagatttagtttttatttagtagtggtttagtttattatggagtttttatatggttatttaagggtataagattaaatatttagtagttaggttggttatgtagatgggttgtgtgatggttttaggttaggaaaatattttggaaggatttttaggtgttagtgggaatgatataatagtaaaaggagaaggtaatttaagttaatagtgaaatgataaaaatttattagaaatatatagggcgttttttattttttggtataataaagttggtattaattttgttttgttataataattttggtttttttgggaattttttaggagagttgtattagattttttgtttagtgtgggaggagtcgtagattttatagtgataggggtggatgatattatattggtgttattttggtttttattggtatgggggtattgtttgtttattgttattgtgtttttttagattttttattgaaaaggaaagtgagggttaggtttagagagatagtggttttttgttttaggggaataaggatattaatttagtttggtggtattttttattttagtttttattttaatgttttttgtttaggttttatggttaagagattagtatttggttgaagtttattttatggtggggttatgattttgggttaagtggttttttttagttgagggtagtttttggagaggggttgagagtgaggattgtttgaaaaggttattagtaataatatttttagtaattggagaaatgtattttttagttttgaaaggggatttgggaggtatagtatggtgtttagtagaggtgaaaattggagatatttttttttttggttttttttgtatttagggtaagggtatgtgttttgtttgattaattaaatatagtttttttgtaatttgaattaaggataggtggtataaagaattagaagtagtggaaaatttttttagtagtggtggt

SEQ ID NO: 283 - DNA, 7588 bp, Artificial Sequence
  chemically treated genomic DNA (Homo sapiens)
tttttttgttttattttagtttaggttttattgttttttttatatgtttttaaatgtaattttttttttggggtttggatttgtagagttaggttttgtttattagggtagcgttggaggaaggtttgtagagtttttttttttattttaaaagatggagttattatttatggttatttttgttatttgcggttgggtttatattttttaattttggtgttgagtataaggggttttttttaattatgggttgatgatttttagggtgtttggtgttaagttatttttataagaaattagatgggtttttggataaaggtaatttgtttttatttattggtgttttgtattggcgaagtaaattttaatttgtttttataggaaaatatgataatttgtataataatattatgatagttttatatattaatataaagttttttgttgattaggtattgtcggattaaatgagttaagatgagtttttttagagtatgtggtttttattattttgtgtttaggtatttgataatatagatagtaggtgtttaataaatgtttgtttattgaatatatgaatgaagaaatatttagtttttgagtgaaattaatatttagtttattagggtttaggttttttaagtattagaaagggtagagttatgaatttgatttaatgatttaaaaattaattattgttattttttttttatagaaattagttgtttttttggtttttgttgataggtatttttttattttttgttttgtgagaggttggtttttagttattattttagtttttgttgtttgacgggatattttatatttttttatatttatttttttttttttatatttatatttattaatggaattaatttttgagaaattttgattttgagttttgattttggtgatttttgttgttgtggtttttggtttgtaattataaatattgaattttgttttggaatagtttaaatataatatttgttttagtggttttttggtaaagagtttttttgataaatttaggaattttggtgttatttttagttgttgttttattttgatgttgtttttttacgttttatgttgaaatgtaatttttaatgttggaggtggggtttaatgggaggtgtttgggttatggagatagattttttatgaagggtttggtgttattttggtggtaatgaatgaatttttgttatattatttttcgtgagagttggttgttaaaaaaagaaagaaagaaagaaaaagtcgggtatttttttttttttttattaagagtttgcgtacgttagtttttttttgtttttcgttatgagtggaagtagtttatagtttttattagaagtagatgtcggtgttatgttttttgtatagtttgcgaattatgagttaaataaattttttttttgtataaattatttagttttaggtttttttttatagaaatatagatggattaagatagttgttattttgagatttttgttattagttatataagggttgtatttagtaagtattgttcggtattttgttgttattttttggagattgttgatttttttttgttttttagattgttgggtttgttttttttgattagttttaataagtttttgatatttttaatatattattagttattatagtgtgaatggaatgaggattattttattgttgtgatgtgagttttatagaaaaatgtatagaaaagtaattaaaataatgtagtaaaggattagaaaatggaggaaatgtttattttttattgatatgtaaagaagttggagttagttggattaaattgatttaagattatttatgagtatatgtatttagtacgtgaagattatttatgagttttatatatatttggtaagtgagaattttttaaagtttaaaattggtgttattaggtatagggaattatttattggtattaatgttatagttattttggaaaatatattaaaatattatttatttttttttttatttttagtaagtaaatggtaatatttttttttaaggaaattgaaaaaatttaagggattattttatttagtttgatattaaagttattttagtttataagtattagatatatggagtagttgtgataaaagtaaagatatttataaattatatttttaaaaaagaattttgagagtgtttatatatttaagtttttataaaagttagtatgaaagtagtaatagaggaaaagagaaaatagttgagttgatattatataatagttaaatggaagggggataaattggtatagttaaatagattatttgattataaaaattaagagttttaaaaatgtgtaaattattagaattaataattttatttttaaaaatttattttgaaaaaaagaattaaaagttaaagatttttaaataaaaaagtgtgtttttttgtttttttgttttttgttttttttttgtttttttttgttttttgttttgagatagagttttattttgttgtttaagttggagtgtagtggtataatttttttttattgtaatttttgttttttaggtttaagtgatttttttgttttagttttttaagtagttgagattataggcgtttagtattacgtttagttaattttttgtatttttagtagagatggggttttattatgttggttaggatgttttttatttgttgattttatgatttatttgttttggttttttaaagtgttgggattataggtgtaagttatcgtgtttggtttgtaaatatgtttttaagtttatttaatgatataggaaaatatttaagttaaagtaataggtgaaaaaattttaatagttgtatatgtagtataattaaaattatattaaaatattattttatatagaaaaaaagaaaagatataaatgtattaaaatattaatattgtttatttttgtatgatgagattgtgaatgattttttttttgagatagagttttattttgttggttgggttggagtgtagtggtattattatagtttattgtaattatagtttattttaggttttatgttattattttgtttttatagttgggattataggtgtgtgttattttattatattttatttaattttttttttttttgagtcggagttttatttcgttgttaggttggagtgtagtggcgtaattttggtttattgtaatttttattttttgggtttaagtgatttttttgtttcggtttttcgagtaggtgggattataggcgcgcgttattacgtttagttaatttttgtatttttagaagagatagggttttattgtgttggttaggttgggtttaatttttaggtttcgtgatttgtttattttagttttttaaagtgttggaattataggtgtgaattatcgtgtttagttttttaatatttttaaagattatataaagaaaagtatagtttttatatatagtttaggagttagggttttgagtgaaatggagtataaggtgatggaagattgtttttggttttgaggattattttgttggatgattagagtttgttttttatttggaagaattatggttttttttttggagagaatttggagttttggttatattttttgagtttttgatattaagattcggtgtggtgtgtgagtagttgggagtaaatgtgagaatagttttgttaattattttttttgttttattattatttattttattttttttatttcgatttttattttagaaaattaatattaagtttttttttggaggggttttttttttttttttttttttaattagtttttttttttttgaagtaatattaaatattagaataaatttatttatatataatgatggtttttaaatatttgaagattatgttggtttttatgagagggtttttttgttttagattaaattaaattaggtttttgtgtgatattttttaagtttttttttattttgttaattttttttggatgttatatttggaattgttaagggttatttaataggtagtgtttggagttaatattggttttttgttttggttagaaagatatattgtaattttgttgagtttgtaaagaatgtttaaggggtatttgtgttcgtagttgttcgtgtagtattttagtttgcggtgttagattcgaatttagagttgtgttaaatgagttaggatttttttttgttgtttttgtgtattggtaggggtattaggttattagtgttaggagattttggttagtgtttatttgtgttgttatatgtagggttttggtagtgaggtttggagaaggaagagaaggggtagggaatttatacgttttgttggttattttttatcgtggttttgttacgggaattttttttttttatttttattttttattttaggtagaaatattttttatttttttttttttttttaagaatttttttttaaaattttggtattttttatatatatttgtatttttgttatatttgtgggttttgttttttttgtaggattttttttggaaagttaattttttttgatattggagaattttattaaattgttgagtattttttttttttttttatagattttatggtatgtttagattatagtagaagatattttttttgttgttaaatttatggtattttgaggttgattgtgtttattttatttttttagttgttttttttttgttgttattattatgttttaagtagattttggagtattttttttatagtagtatggattttggtagattttttggggattagcgatgttttaatttgtttgtttttttagggttgatgtttgtagggtgttttttttttttttttgaattaaagtagaaattattttgtatttttatgtaattttttcggtaggttttaatagataaataaagtttattattttttatgggtttattttttttagtagagtatttgggttggtttcgaagtttttaattatttgtacgtttgttagggtttttttggggtagttatgaagtttttcgttttgtttttttgttttgtttagttttggggttgttatttagttttatatggtttagggttgatttatagataatcgaattgcgatgatttagaaattgaggaagtagttttggtggttatagattatattaattaaaattttttttggggatataaatatattttgaattagattgatgaagtaaaggtgtggttttaggtaagtggatttgttgtttatgagttgaaataatgtgtatatggagtttaattaggtgttttaaaaaattattattatttagtgtaaatgaaattatagaggagtaaattttttgatttttttttaggagtgagggaaggggtaggtagagggtaggagaggagatattttgtatggtagttatgggtgttaggagggagttgggtggggtgtgaggtggtgtgtaggagaaaaagtgttttaaatggtagtgtgtagattatagatagaaagtgtaatttgttggaaaaattaggatttaagagattagtttttagttgttaagttattattggttgaaaattacgtatttgtttttggtttggtttttttttaataaagattgagaatgaataaaattagtatttggtagatgtttattatatgttaggtttatttatatagattattttatttattttttttcggttttgttttttggtgttgtgtggtatatatattgtttttgttttatttaagaggagattaaggttttgttgtgtgtgtgtgtgtagtttttttgttttttgtttttgtttttttttttttggtttaaaattatataattattaagtttttaggttgggatttgattttatatttgtgtttttttttttatataaattgttttttaaagagagttatttatattttagagagaagttttggtataaatataatttatttttttatatattagataggaaattaacgtagtttgaagttagtgataagaaaaattaagttggaaatatgtttcggggattagttaagagatttggagaggtggaaagaagttgtttgtttattgtttgttttgaaattagatttatttttgattaaggataatttttttagtaaatatgtattataagttttttttggataagaattagagatattaggttgaattatataaaattgttatttttttatattaaaagtaattaaatattggtcgttttaatggtttaatttaatatagtggtgaaaaaggtataatatgtgtttataagagtttataatttaggttggaaaataaggttaataataggaagtttggatcgattgacgattgttattcgttttataaagagataaaatatttgaaattaggattgtttcggatggattttaagagtgttgtagttatattaaagtatagtggtggttaggaggaaacgttgattaagttaggggaaatgaatacgtaatacgtatatttgagggaaaaggtaattatgaatgggtattgtgatttttattaaaggtagagttttagagttggtttttttgagaaatttaggtgtattcggtttttgttcgttagagttgtgaacgtttttaggtagttattttgggtatatttggatattataaaatgcggagttttttttaggggaggggatgttgaggttttaggtattagtgaattaggtagaattaatgagaggtaaatagagttgggttgagaggagaaaaggtatatttgtattttttggattttttaggtttcgaagataagatatagaaataggtgaatttataagaatatttttaaggattgttgtaagttttttcgtgtttatattagtgatatttagttttttgttagagggagatatgtttttttttattatcgttagtagggggaagtagagagtagtatcgttgtatgtcggtatttgttgtataagttaagataaaggaaaaattaaggataatagtagtaaaaatttttaggagggaaaagaaaacggaggaaggaaggaaagtaaataatgaaaaggaagaaagaaagaaggagagggagggatagaggagattaaaaaaagatagtaagatattattttatattattttattttgtagtttgtttgagaaaaatttaaatttgtattttttaaagtattgtttgaagagtgaaattttaaaaaattaaataaataataaatataaataagtgttaatatttatttgtagtttttaaatagagtttagagtgagggttgtggttttatcgatttgtttaagtttaggatttcgtttgttttgcgagtattatttggtgtttttttaattaatagacgaagattagataagttttggttattgttttgtttataggttagtttagagttagacggagttgtagattgatagtaagaatgatattttttttatttttttaaaagcggggtgtttttaagtttaatgagggcgtatatcgtggatcgtattataggattaggggaataggttgtttacggttttattttttgtttttatagt

SEQ ID NO: 284 - DNA, 7588 bp, Artificial Sequence
  chemically treated genomic DNA (Homo sapiens)
gttgtggagataaagagtgaagtcgtgagtaatttatttttttgattttgtggtgcggtttacggtatgcgtttttattgggtttgagagtatttcgtttttggagaggtgagggaaatgttatttttattgttagtttgtaatttcgtttagttttgaattggtttgtgggtaggataatgattagggtttgtttggttttcgtttgttgattaaggaagtattagatgatgttcgtaaagtagacggggttttgggtttgaataagtcgatggagttatagtttttattttgagttttatttgaaaattataaatgggtgttaatatttatttgtatttattatttatttaattttttaagattttattttttaagtagtgttttggaaaatgtaagtttggattttttttagataagttgtaaaataaggtggtgtagggtaatattttattgtttttttttaattttttttatttttttttttttttttttttttttttttttttattatttgttttttttttttttttcgttttttttttttttttagaggtttttgttgttgttgtttttggttttttttttgttttggtttgtgtagtaggtgtcggtatgtaacgatgttgttttttatttttttttgttggcgataatggggaagggtatgtttttttttgataggaaattggatgttattagtgtagatacgagggagtttgtaataatttttggagatatttttgtgagtttatttgtttttgtattttgttttcgaagtttgaaaaatttagaaggtataagtatgttttttttttttttagtttagttttgtttgttttttattggttttgtttgatttattagtatttgaagttttagtatttttttttttgggagaagtttcgtattttatgatgtttaggtgtgtttagagtgattgtttgaaagcgtttatagttttggcgaataggaatcgggtatatttgggttttttaagggaattaattttgaagttttgtttttagtaaaagttataatgtttatttatgattatttttttttttagatgtgcgtgttgcgtgtttattttttttgatttgattagcgtttttttttaattattattgtgttttaatatggttgtagtatttttaaaatttattcggagtaattttgattttaaatattttgtttttttgtgagacggatggtagtcgttagtcggtttaggttttttgttgttgattttattttttaatttagattgtaagtttttgtgggtatatattgtgttttttttattattgtattaggttgaattattaaaacggttaatatttggttgtttttgatatagaaaaatggtagttttatatggtttaatttaatatttttggtttttgtttaaggaaggtttgtaatatatatttgttgaaagaattgtttttaattagaaataaatttaattttaaaataggtagtaggtagatagtttttttttatttttttaaattttttgattgattttcgaggtatatttttagtttgattttttttgttattggttttaagttgcgttggttttttgtttagtgtgtgaggaggtgaattgtgtttatgttaagatttttttttgggatgtgggtaattttttttgggaggtagtttgtgtagaagaaggaatatagatatggaattaaattttagtttgaagatttagtaattatatgattttggattaaaaaaaaaaagataaaaataaaaaataaaaaaattgtatatatatatataatagagttttggtttttttttgggtaagataagaataatatatgtattatatagtattaggaggtaggatcgggaaagagtaaatgagataatttatgtgaatgggtttggtatatagtaggtatttgttagatgttagttttatttatttttagtttttgttagagagaaattaaattaaagatagatacgtgatttttagttagtggtaatttggtaattaggagttggttttttgggttttagtttttttagtaagttatattttttgtttgtgatttgtatattattatttgaagtatttttttttttgtatattattttatattttatttagtttttttttgatatttatgattgttatatagaatgtttttttttttgttttttgtttgtttttttttttatttttgggaagaaattagagaatttatttttttgtggttttatttgtattgggtgatggtgattttttgaggtatttgattgagttttatgtatatattattttagtttatagatagtaggtttatttatttgaggttatatttttattttattaatttggtttaaggtgtgtttgtatttttaaggaaggttttgattgatgtagtttatagttattagagttgtttttttagtttttggattatcgtagttcggttgtttataaattagttttgggttatgtggggttgagtggtagttttagagttgagtaagataaaggagtaggacgagggattttatggttgttttagagaggttttggtaggcgtgtaggtggttggaggtttcgggattaatttaggtgttttgttgggaaaggtagatttatggagggtggtgggttttatttatttgttggagtttgtcggaagaattgtataaggatataggatgatttttgttttggtttaaaagaaaaaaaaaaatattttgtaaatattagttttggaaaagtaaataggttaggatatcgttggtttttaagaaatttgttaaagtttatgttgttgtgggggagatgttttaaagtttgtttggaatatggtaatagtagtaaagagaagatagttgagggaatgaggtggatatagttagttttagagtgttatgggtttggtagtagaggaaatgttttttattgtgatttgagtatgttatggggtttgtgagagggaagggaggatatttagtaatttgataaaattttttaatgttagggggagttagttttttaagaggagttttatagggagaataaggtttatagatatagtaaaggtatagatgtgtataggagatgttaagattttgggggaagatttttggagaaaagaaaaaggatgagagatgtttttgtttaaagtggggaatggaggtggaagaagggggttttcgtggtaggattacggtgggaaatgattagtaaaacgtgtgggttttttgtttttttttttttttttttagattttattgttagggttttgtatgtgatagtatagatgggtattgattagagttttttagtattagtaatttagtgtttttgttagtgtataagggtagtagaggggagttttgatttatttgatatagttttgggttcgagtttgatatcgtaggttgagatgttgtacgagtagttacggatataaatattttttgaatattttttgtagatttagtagaattatagtgtgtttttttagttagaatagagggttagtgttgattttaggtattgtttattaagtgatttttgataattttaagtgtgatatttaaggagggttggtaggataaagagaggtttgggaaatattatataaggatttggtttggtttagtttgaagtaaagaagtttttttatggagattaatatggtttttaaatatttagaggttattattgtgtgtgggtgaatttgttttaatgtttgatattgttttagagaaaaaaaaattggttaaaaaaaaaagaaagaagagggtttttttaaagggaagtttaatattgattttttggggtgagaatcggggtgagggaggtgaagtgagtggtgatggggtagagaaggtagttggtaggattgtttttatatttatttttagttgtttatatattatatcgaattttaatgttagaagtttagaaggtgtggttaggattttaggttttttttaagagggggattatgatttttttagatgaaaaataaattttggttatttagtaagatgatttttaaagttaggggtaattttttattattttatattttattttatttagggttttgatttttgaattgtgtgtggaagttatgtttttttttatataatttttaaaaatattgaagggttgggtacggtggtttatatttgtaattttagtattttgggaggttgaggtgggtagattacgaggtttagagattgagtttaatttgattaatatagtgaaattttgttttttttaaaaatataaaaattagttgggcgtggtggcgcgcgtttgtagttttatttattcgggaggtcgagataggagaattatttgaatttaggaggtggaggttgtagtgagttaagattgcgttattgtattttagtttggtaacggagtgggatttcgatttaaaaaaaagaaaaattgaataaagtgtggtaaggtggtatatatttgtaattttaattatgaaggtaggatgatagtataagatttggagtaggttatggttgtagtgagttatgatagtgttattgtattttagtttagttaatagaatgagattttgttttaaaaaagaaattatttataattttattatgtagagataaatagtgttaatgttttgatgtatttatattttttttttttttttatgtaaaataatattttaatataattttgattatattgtatatatagttgttaaaatttttttatttattgttttaatttgaatatttttttatgttattaagtagatttaaaaatatgtttataggttaggtacggtggtttatatttgtaattttagtattttgggaggttaaggtaggtggattatgaggttaatagatagagagtattttggttaatatggtgaaattttatttttattaaaaatataaaaaattggttgggcgtggtgttggacgtttgtaattttagttatttgggaggttgaggtaggagaattatttgaatttgggaggtagaggttgtagtgaggggagattgtgttattgtattttagtttgggtaatagagtgagattttgttttaaaataaaaaataaaaaaaaataaaaaaaaaataaaaaataaaaaaataaaaaaatatatttttttatttaggaatttttggtttttgatttttttttttaggatagatttttagaagtaaaattattgattttaatgatttgtatatttttaaagtttttaatttttatagttaaatagtttatttggttatgttaatttattttttttttatttagttgttgtgtgatgttagtttagttgttttttttttttttttgttattgtttttatgttgatttttgtgggaatttagatatgtgaatatttttagaatttttttttaaaaatgtaatttatgaatatttttgtttttattatagttattttatatgtttaatatttataaattaaaataattttggtattaagttgagtaaaatgattttttagatttttttagtttttttagaaagaaatgttgttatttatttattggaaatgaggaagaaaatagatgatattttggtatgttttttaagatggttgtagtattagtgttaatgggtagttttttgtgtttgatgatattagttttaaattttaaaagatttttatttgttaaatgtatatgggatttatgagtgatttttacgtgttgaatatatatatttatgagtaattttgggttagtttgatttaattggttttagtttttttgtatattagtaggagataggtattttttttattttttggttttttgttgtattattttagttatttttttgtgtatttttttatgaggtttatattatagtaataaaataatttttattttatttatattatgatggttgatagtgtattgaggatattaagggtttgttagaattggttaaggagagtaggtttaatagtttaaggagtaggagaggattaataatttttaggagatggtagtagggtgtcgggtagtgtttgttgggtgtaatttttgtgtggttgatggtagaaattttaagatggtagttgttttagtttatttgtgtttttataaagaaaaatttgaggttgggtaatttatatagaaaagaggtttatttggtttatggttcgtaggttgtataagaagtatgatatcggtatttgtttttggtgagggttataggttgtttttatttatggcggaaggtaaagaagagttggcgtgcgtaagtttttggtgagagagaggagagatgttcggttttttttttttttttttttttttttaataattagtttttacggaaaataatatagtaggaatttatttattattattaggatggtattaagttttttatgagggatttgtttttatgatttaaatattttttattaggttttatttttaatattggggattatattttaatatgagacgtggggggataatattaaagtagagtagtagttaaggatggtattagggtttttgaatttgttaaaaggattttttgttagggagttattagggtaagtgttgtatttaaattattttaaggtagaatttagtgtttatagttgtaggttaggagttataataataaagattattagggttagagtttagggttagagttttttagaggttggttttattagtggatgtgggtataggagggagaggatagatatagaaagatatgaaatatttcgttaggtagtaagagttaaggtgatagttagaaattagttttttataaaatagaagatgaaaaagtgtttgttagtaaaagttagaaggataattggtttttgtagggaggaaatagtagtggttggtttttaaattattaggttaggtttatggttttgttttttttggtatttaaagggtttaggttttgatagattgggtattaattttatttaaagattgggtgtttttttatttatatgtttaatgaataaatatttattgagtatttattatttgtgttattagatgtttggatatagagtgatgagaattatatgttttggaggagtttattttgatttatttagttcggtaatgtttgattagtaaagaattttatgttaatatatgaaattattataatattattatataaattattatatttttttgtggagataggttgggatttatttcgttaatgtaaagtattagtgaatgaaagtaaattatttttgtttaaggatttatttggttttttgtgaaagtaatttagtattaagtattttggaagttattaatttataattaggaagagttttttgtatttagtattaaagttgggagatgtgggtttaatcgtaggtggtaaaaatgattataagtaatggttttattttttggggtggaaaaaggggttttgtaagtttttttttaacgttgttttgataagtaggatttagttttgtaaatttaaattttagaaaggaaattgtatttgagaatatataaagggaatagtaaggtttggattagagtagggtaagggag

SEQ ID NO: 285 - DNA, 5774 bp, Artificial Sequence
  chemically treated genomic DNA (Homo sapiens)
ggtaggaggattatttgagtttggaaagttaaggttgtagtatattatgatggtgttattgaattaatttgggtaatatagttaatagagtgagattaaaaaattaaaaaaatagattagatttttgttgtttaagttggttgttaatttttagttttaagtaattttttttttttagttttcgaaattgttgagattatgggtgtgagtcgttgtgtttggttaaggttttttgtttttttttttaagttatttatttgtttaattttttttttttatgagatggagtttaatttattttgttgttcgggttagagtgtagtggtataattttagtttattgtaatttttgttttttgggtttaagaaattttttgttttagttttcggagtagttgggattagagacgtgagttattaattttgtatttttagtattttagtatttttgtattttgatttttgtatttttagtagagatggcgttttattatattgtttaggttagttttgaatttttaagtttaatttatttatttgtttttagttttttaaagtgttgggattataggcgtgagttattatatttagttggttttttgttttagtaataattttttgttgttttttttttagattttcgaggtttgtcgataggttcgaagttattttgagttttttgaggatttagtgtaagtgtttaggaatttggttggtgagttggtggtgtgtatatatagttagaggttagaattaagattttttatagtgattttgagtttttatttaggattggtatttttttgtggatttttagttttataaggatagagaaatagtttgtaatgggagtgataaaaatgaaagaataaatttttagggattgtaatattttgttttgtaaaaatatattagaaatttagaagtaggagaatgaagtaaatggaatttatataaagaaaatgaggttggaagacggtgtattagttttatttttatttttttaaaaaaaataaaaggttggaggaggaggtggaggcggtcgacgaggacgatgaggaggacgacgacgagggagtattcgggcgcgggtcgggttacgatcggggtcgcgatcgttatagttttttcggttgttattttttttcgtcgtcgtcgtcgtcgtcgttatcgttgttttcgtcgtcgtcgttttcgtcgttaggtaagcggtcgtttcgattttttttttaagttcgagtgggagtcgcgggcgcgcgaagtcgggcgggggcgaggtatttatcgcgcggtcgagtcgaggcgaattcggagcgcgaattcggggttcgggttcgtggtttcgcggcggttcgggaggtcggggcgggcggtggcggttgcgatcgcggggttaggtttttttttttttttcgtcgtatttttttttcgtcgtcgtcgtcgtcgtcgtcgttatttcggttggagagcgttgggcgcgagttgcgcgcgcggatcgggttattcggtcgcggttttcgggggaggaggaggaggaggttttttttttattttcggcggggagggggtaggtaggaaacggttaaggcgaagttagggttttttttttggtcgagcgagggatcgtcgagattttggcggtcggacggcggcgtgggggaggggtacgtgggggaggggcggtcgcgcgagcgtttttcgggttttggtttcggtggggttggatcgagggagagtggggttttttcgtacggagtagtcgacgggtttgtttttttcgtttaggatttggataggtagagtgaggacggtgtttatcggatttttttttattcgcggagatttaggtgttcgttaattgaggggtatgcggtggtacgcgagggaggggttttgtgaatgtttgtgggttgttgatgagtaggggtaggtggtggttatagtttacgtagattattttttggaataaggtaggagttcgttttttcgtttttttagtttgtgtagggatagtagtttattcggattggggagcggagagaagagtgtttggggaattagatgtttttagttttattttttttatttcgtcggggttttgggtttttttgtgttaagtgcggtgggggggggttttttttttgatttcgttagtttggggtggttaagttgtttagttgtgatttttacgtggttgttatttattgttatttattttttcgttgaaattatttattttttgagtacgttggggggcgtgaattgtttatttagttgttttgtagtttgattattatttagtattcgtttttcgaggtgataagttattcggcggtattttttgggcggcgttttttagatcgttgcgtcgcgttaggcgtttagcggtgttttttttagattatttttttagtggagtgatttttagttttttttgggataggtgagtatttgggtgtttatattttttgtttggggaatagtagggggattttcgtattttcgggtttttggttgttatgcggtataaatgtattaaattttaaaacggttaatttcgggttttttgtaaaattgttatattgattcgtgtggtttttgtggtaaacgtttttgtttagtcgagacgatttttgggggagcggggggtgtttttttgtgggtcggggagggatgtgtgttttttggaaattggataaagttttttcgttttttaagtttgtttgaaaaagggtaaagttttgaaaaagtttttttagagagttttttgttttggtaggaggaggaggaatgaggagttgtggggagagggtgtttttggggttgttttcggtagaggcgttgaaaagagggaaagaaaggtcgttaggttttgttaggggtttggtagcgtttatttatttgtattgggatttggagtttggggtggggtggtgtgggtttcggatttgggtacgttggggagagaagcgtgaaaggattcgaggttgagatgggtttttgtgttaattcggtttttttttttttttttggttttttgaatagattagaagagacgttagaggttgtttatattttataattgaaatgaaaatttattttttttttttttttgggtaatttttattttttttttagttttttaagtcgaatgagtgatttagatatatttttttagatgattttcggaggtaaaatttcgggaaattatttttagtatatttattatttttgtttatttaagtgtggggaaaagaatttttttttaaggaaatttgtttaggttgttttcgtttttttttgtttagagtatgtatttgtgtataggagagatttttattgttttttatttcgattgttttgatttttattattttgttttatatttttatttaagattaattttattttttttttttttttttagtttttttatattgttaaacgtttaaaataatagtagtcgtgttggtgggggaagggagtaggaagttaaaaatttatttttttttttttttttttttggtaagtcgagagaaataatataatataatatatagatgtgattttttgggggtgggggtggggaatgattgtgggtggtgcggaaaattttggtagtttttttgtaaaaggtttgaaaatataaatttattttttgtttgtagtacgtatgtgtagtagatttattatggtggtgcgttgtgggggagggaggggaatttgagaaaaaataaatatatgtgtgagagattgatggtgagattagaagaagagaggggcgggcgggaggcgaggtttcggtcgagatttttttcgtttgttcgggcggttaggtttcgttttgcgtttttcggttttcgttttttttttttttgtttttttgagattcgagtcggggatgtgggagagtttgggttttaggttagtattgagtggttgttgagatcgaggttgggatttagatttgttttattatttttttttgtttttttttgtcgttttcgttttgtttttttcgttatcgacgtttgtttaagttcgggaatttttcgttggggtggggagtagagtgaatcggtttgtgtattatttttggttggtggtggtcgaggtcgtgtttttgaattttagttagttggtttgtttttgttattgtttcggtagtttgcgtttttatgtttaagttaatcgaagtttttggggttagggggagtcggttgttggggtatggcgttttttttgttgattttttattatagtttttatttcgttttatattcgggttttggtagttatttttttgtatatacgtatatagttttagagtgtttttttgtataaggggatataggatgttggagttagtaggaaaggtggtattgaaggaaggcgaggtagcgattttgaggtagtggaaacggaggtttttggtgttaattgtggttaatttttcgttggttgttgagggaaggagaaaggattgtgtgttttagagttaggggttgggttaagtttaggtttttttattttgtatcggttgtttttttttgtattagataggtttggttggttagtttagtgtttggtaggggagggacgtgaattagagttttagggttttaggtttgtggggtattttgtttttttttatgtggggtaatttttcgtttcgttttttaagtttttatagagtgatatttttatagataatggggtggggggtttggggttttttggtagagatatttggggagaaagttagggatttatttttgttgaagtaggtataggttattttttggatttgtgggtttgagagtgtgtgtgggtgtgggtgcgcgcgtgcgcgcgcgtgtttttgagaaggtatatgttgggtgtgtttgtttgtgtttatatttttgtttgggttttttatattgcgtatagatgaatgggttaggatatttggaataaaatatggaggtgaagggtgagatcgggaaataaagggtatggttttttagtttttaaagggagtagggagatgggaatagaattgaaggtaggttttaggttatttgggaggaggaatatttaggtaattgtggagatttttttttgtgtgatgaaggtggtagatattgtgattttgtgggtaagaagtaaaaatgattagttgaggatttttttttttttaggattgtgttggggtgataggatgtttggtaattattcgaggaaatgtaaatagaggttttttttttggtaaaaggatgttagggttttagggtgttagtgtgagaatttaggtgtttatttttggttttttttttttagtatttggtttagggagttgttagtttgtgtttttttattttaagtgttggggttaggttaggttagtagttgggtatggtttttttagtttttgggtaggatgttagttggcgaagtgagggggaaggtaggaggagttttggcggtgattgaaaggatttgttatagttagagtttatggtttggagtttggttttttgttagtaggaggggagggaggggagtggtttggttgttttttttttttgatttttgattttttatttagaattagagtattttagagtattcgaaatattttttgtttgtatttagtgaagggaggtagggtttggaggagttaatgttttttagagagtgggaattgtcgaggtggggaaggggtaagttgaggggttttagaggttggaaatttagaggtttaggttttttgatgttttttgttttaaaga

SEQ ID NO: 286 - DNA, 5774 bp, Artificial Sequence
  chemically treated genomic DNA (Homo sapiens)
tttttgaagtaaaaagtattagaaaatttaagtttttaggtttttagtttttgaggttttttaatttgttttttttttatttcggtagtttttattttttaggaagtattaatttttttaagttttgtttttttttattggatgtaaatagaaagtatttcgagtattttgggatgttttggttttgaatgggaggttaggggttagaagagaagagtagttaaattatttttttttttttttttttattaataagagattaggttttaggttatgggttttgattgtggtaggtttttttagttatcgttagggttttttttgtttttttttttatttcgttagttggtattttgtttaggaattggggaagttatgtttagttgttggtttggtttgattttagtatttggagtggggagatataagttggtagttttttaagttagatgttggggagggagagttaaaggtggatatttgggtttttatattaatattttggggttttgatatttttttgttaagagggaggtttttatttatattttttcggataattattaggtattttgttattttaatatagttttggaggaaaagaaatttttagttggttatttttattttttgtttataggattatagtgtttgttatttttattatataggagaaagtttttataattatttaaatatttttttttttaagtagtttaaaatttatttttaattttatttttatttttttgttttttttgggaattagggggttatattttttgtttttcgattttattttttatttttatattttgttttagatattttgatttatttatttatacgtagtatgggagatttaaataaagatataggtatagatagatatatttagtatatgtttttttaaaagtacgcgcgcgtacgcgcgtatttatatttatatatatttttaggtttataaatttagaggatggtttgtatttgttttagtagggataggtttttggttttttttttagatgtttttgttagaggattttaggttttttattttattatttgtgaaggtgttattttgtgaaggtttggggaacggaacggagagttattttatataaaggaagataggatgttttatagatttggggttttggggttttggtttacgttttttttttattaagtattagattaattagttagatttgtttagtatagagagaggtagtcgatgtaagatgggaaagtttgggtttggtttagtttttagttttaggatatataatttttttttttttttttaatagttaacggaaaattagttataattaatattagaggttttcgtttttattgttttagagtcgttgtttcgtttttttttagtgttattttttttgttaattttagtattttgtgtttttttgtgtaggaagatattttaggattgtgtgcgtgtgtgtaggggggtggttgttagagttcgggtgtgaaacggaatggggattgtaataggaagttagtaaggaaggcgttatgttttagtagtcggttttttttggttttagggatttcggttgatttgaatatggaaacgtaggttgtcgaggtagtggtaagggtaggttaattggttaaggtttagggatacggtttcggttattattagttaggggtggtgtataagtcggtttattttattttttattttagcgggaggttttcgaatttgggtaggcgtcggtggcgggagaggtaaagcgagaacggtaaggaaaagtaaggaagggtaataaagtaaatttaagttttaatttcggttttagtagttatttaatgttggtttggagtttagatttttttatattttcggttcggattttagggaggtagggaggagagaggcgggggtcggagggcgtagggcggagtttggtcgttcgagtaagcgggaggagtttcggtcgaagtttcgtttttcgttcgtttttttttttttttaattttattattaattttttatatatatatttatttttttttaaattttttttttttttttataacgtattattataataggtttgttgtatatgcgtattgtaggtagggggtgggtttgtatttttagattttttgtaaagaaattattagaatttttcgtattatttataattattttttatttttatttttaaggaattatatttatatattatgttatattatttttttcgatttgttagaagggggagggagaagaaatgagtttttggttttttgttttttttttttattaatacgattgttattattttaaacgtttaataatgtaaggagattggagagagggggaagggataaaattggttttgagtaagaatgtaaaataaaatggtgagaattaaagtagtcggaatggaaaataatggaaattttttttgtgtataaatgtatattttagataaggaagagcgagggtagtttgaataaatttttttagaggagggtttttttttttatatttaggtagatagaaataatgagtgtgttaaaaataatttttcgaagttttattttcgaaagttatttgagggggtgtatttgggttatttattcgatttggagggttgaaagggagataaaaattgtttagggggagaggggaggtgggtttttattttagttgtaaaatgtaagtagtttttgacgttttttttggtttatttagaaagttaagagggaaaggggaggtcgggttgatataaagatttattttaatttcggatttttttacgtttttttttttaacgtatttagattcgggatttatattattttattttagattttaagttttaatataaataggtgagcgttgttaagtttttggtaggatttgacggtttttttttttttttttttagcgtttttgtcggaggtaattttaaaggtattttttttttataattttttattttttttttttttgttaaggtagggggttttttgggagaatttttttaaaattttatttttttttagataagtttggggggcggggagattttatttagtttttaggagatatatattttttttcgatttataagaaagtatttttcgtttttttaaaggtcgtttcggttagataggaacgtttgttatagaagttatacggattaatatgatagttttataaagagttcggagttggtcgttttgaagtttggtgtatttgtgtcgtatggtagttagaggttcgggggtgcggaggtttttttgttgttttttaagtagggggtgtggatatttagatgtttatttattttaaagaagattagaaattattttattaggagggtggtttgagggggatatcgttgggcgtttgacgcggcgtagcggtttggagagcgtcgtttagagagtgtcgtcgggtgatttgttatttcgggggacgggtgttgagtgatggttaagttgtagaatagttgggtgggtagtttacgttttttaacgtgtttagggagtgggtggttttagcgagagagtgagtgatagtgaatggtagttacgtgagagttatagttgggtagtttggttattttagattgacggggttaagagggggatttttttttatcgtatttgatataaaagagtttagagtttcggcgagatgaagggggtggagttgggggtatttggttttttagatattttttttttcgttttttaattcgaatggattgttgtttttgtataggttgggggagcgaggggacgagtttttgttttattttaggaagtggtttgcgtggattgtggttattatttgtttttatttattagtagtttataaatatttataagatttttttttcgcgtgttatcgtatgttttttagttggcgggtatttaagttttcgcgggtggaggggggttcgatggatatcgtttttattttgtttgtttaagttttgagcggagggggtaggttcgtcggttgtttcgtgcggggaaattttattttttttcggtttaattttatcggggttagagttcgaggggcgttcgcgcggtcgttttttttttacgtgttttttttttacgtcgtcgttcggtcgttagggtttcggcggtttttcgttcggttagggagggggttttggtttcgttttggtcgttttttgtttatttttttttcgtcgagggtaaaaaaaaaatttttttttttttttttttcgaaagtcgcgatcgagtggttcggttcgcgcgcgtagttcgcgtttagcgttttttagtcggggtggcggcggcggcggcggcggcggcgggggaggggtgcggcgggggaggggaggaggtttggtttcgcggtcgtagtcgttatcgttcgtttcgatttttcggatcgtcgcggggttacgggttcgagtttcggattcgcgtttcggattcgtttcggttcggtcgcgcggtgggtgtttcgttttcgttcggtttcgcgcgttcgcggtttttattcgggtttggggggggagtcggggcggtcgtttatttggcggcgggggcggcggcggcgggggtagcggtggcggcggcggcggcggcggcgggaagaggtggtagtcgggggggttgtggcggtcgcggtttcggtcgtggttcggttcgcgttcgagtattttttcgtcgtcgttttttttatcgttttcgtcggtcgtttttatttttttttttagttttttattttttttaaggaaataagaataaagttgatatatcgttttttagttttattttttttatatggattttatttattttatttttttgtttttaggtttttgatgtgtttttataggataaaatgttataatttttagaaatttatttttttatttttattatttttattatagattgtttttttgtttttgtgaaattgggagtttatagggaggtgttaattttggataaaagtttagaattattgtagagaattttgattttgatttttaattgtatatatatattattaatttattaattaggtttttgggtatttgtattgagtttttagaaaatttaaggtagtttcgggtttgtcggtaagtttcgggagtttaaaggaagaatagtagggagttgttattaaaatagaagattagttggatgtggtggtttacgtttgtaattttagtattttgggaggttggaggtaggtggataaattgagtttaagagtttaagattagtttgggtaatatggtgaaacgttatttttattaaaaatataaaaattaaaatataaaaatattaaaatattaaaaatataaaattggtggtttacgtttttaattttagttatttcggaggttgaggtaggagattttttgaatttaggaggtagaggttgtaataagttgagattgtgttattgtattttagttcgggtaatagagtgagttagattttattttataaaaaaaaaaaattaaataaataaataatttaaaaaaaaaaatagaggattttggttaggtatagcggtttatatttataattttaatagtttcggaggttaagaagggaggattgtttgaggttaggagttaataattagtttgggtaatagagatttggtttatttttttgattttttggttttattttattgattatgttgtttaggttggtttagtggtattattatggtgtattgtagttttgattttttaggtttaagtgatttttttgtt

SEQ ID NO: 287 - DNA, 5362 bp, Artificial Sequence
  chemically treated genomic DNA (Homo sapiens)
tttggttttttttttttttttttataagaagttttaaaatatttttgtttttttatatatatattaaagaagaatttttaggttaggtgcggtggtttatgtttgtaattttagtattttgggaggtcgaggcgggtggattacgaggttaggagttcgagattagtttggttattatggtgaaatttttatttttattaaaaaaaattaaaaattagttgggtatggtggtgggcgtttgtaattttagttatttgggaggttgaggtaggagaattatttgaatttaggaggtggaggttgtagtgagtcgagattgagtgattgtattttagtttggatattagggtgagattttattttaaaaaaaaaaaaaattttattagtatttttggggtggtagaaatgattgtataaggtagtttgtttttttttttgtagatatttaatttggagtttgtttttggttttttttttttaagttttatttatttttattggtaattttatttattatggtgatttgaattttattatatatatgatttttaaatttatttttttttttttaatttgttttaagtttttatatttattttttatatatttgatacggttatttgaatatgataaaagtattttgaaatatatcgaaaataaaaaatatttttttatatttatttttttttgattttttagattattcgaattattattatttttattattattatttttgagacgaagttttgtttttgttttttaggttggagtgaaatggcgcgatttcggtttattgtaatttttgttttttgggtttaagcgatttttttgttttagttttttgagtagttgggattataggcgttcgttattacgtttagttaatttttgtatttttagtaaagatggagttttattatgttggttaggttggtttcgaatttttgattttaggtgatttatttgtttgggttttttaaagtgttgggattataggcgtaagttattatgtttcgtcgatttattattagaattattatttatattgttatttaagttatatattttagatttatttttaatttttttattataatgtaaatatgttgtttttgagatagagttttgtttttgttgtttaggttggagtataatggtgtagtattagtttattgtatttattgttttttgggtttaggagatttttttgttttagttttttaagtagttgggattataggtatttattattatacgtggtaaatttttttatttttaatagagatggggttttattatgttggttaggttggtttcgaattttcgattttaggtgattcgttcgttttaattttttaaagtgttgggattataggtgtgagttattgcgtttggtttattttttaatatgttttgtttatatttattgtttgagtttaggtttggtttttttttatttttagattggattattataatagttttttagttggtttttatttttatttttaatattttttatattattgttatatttttttataaaatatttatgattgtgatatttttttgtttaagttattattgaattatttttatttttagtagtattttttaaagtttttttttattttttttgagatagggttttattttaatgagtaggttagaatgtagtggcgtgattttggtttattgtagtttttattttttaggtttaaggaatttttttattttaatttttagagtagttaggtttataggtatatattattatatttaagtaattttttttaaattttttgtagaggtggattttgttgtgttgtttaggttggtattgaatttttgaatttaaattatttatttgtttcggttttttaaagtgttgggtttataagtatgagttattatgtttggtttattattttttagttttatatgtgtttttgagatgattttagatgatagatgggtaaatagtttttaatagttgtgtttttatttgaattcgtagtagaaaaatattgattttttttttagtgtaaatttatgtttaaagttagtttatttaaggaaaaataataagtaataattagtatggaggttatttttaaatattaaaaattatgaatatttaaatatttgaagtaggtaaattttttgtttataggataaattttaaaatttttagtatagtagattttaaattgtatttttagttttattttttagttatatagtatcgggtagatagaattttttgttattttaatatttatttattcgataagtatttattaaatgtttattatgagttagatattgggttaaattttagggattttagttgtaaataattatttttgttataaggattatattttaacgggaaaaatagataataaataagttagaaagtaaataaggtaattaaagattttgattggtttaagtaatatggtaagatttcgtttttataaaagattttttaaaaattagtcgtgtgtagtggcgtgtgtttgtagttttagatattcgggaggttgaggtaagagaattatttgggtttgggaggttggttgttgtgagttataattgtattattgtatttagtttggttgatagagtgagattttgttttaaaaaaaaaaaaagaatgaaagaagattttgatttaagttttgtgaaggaaatatatagttaaagataggagggtagagaagatttttttgggtgatagtattattgagattttaaaaatgaggtcgaattcggtcgggcgcggtggtttacgtttgtaattttagtattttgggaggtcgaggtgggtggattataaggtacggagtttaagattagtttggttaatatgttgaaatttcgtttttattaaaaaaattttaaaaagttgggcgtggtggtacgtgtttgtagttttagttatttcggaggttgaggtagaggaatcgtttgaatttagtaagtggaggttatagtgggtcgagatcgtgttattgtattttagtttgggtgatagagcgatattttattttaaaaaaaaaaaaaaaaaaaaaaaaatgaggtcgaatttaatatgtgaaaagttagaggaagagtattaggaatagaaagttgcggggagtagtggtttatgtttgtaatttaaatatttgggaggtcgagaagggcggatgatcggaagttaggagttagaaattagtttggttaatatggcgaaatttcgtttttattaaaaatataaaaattagttaggtgtggtgtcgtacgtttgtagttttagttaatcgggaggttggcgtaggagaagttttgaatttaggagatagaggttgtagtgagttaagatcgtattattgtattttagtttgagtgatagagtgagatttcgttttaaaaataaaataaattaagttgtaaaagttttgggatgagaaagagtatattatagttgggcgaaagagtaaggagagttttatgggttaaggagaagaacggtggttgaataggttgaaaatataggtagagtaggttttgtgagtttgaatttttattttaagtgtagtaaaatgttaaggaaagagtcgggtgtatggttatatttttgtcgttttagatgtttgggaggcgagttttaggttagtttgggtagtataattaaatttttttaataaaaagggtttttaggtcgggcgtagtggtttacgtttgtaattttagtattttgggaggtggaggttggtggattatttgaggttaggagtttaagattagtttggttaatatggtgaaatttcgtttttattaaaaatataaaaattagtcgggtgtgtgtgtgtgtgtgggggggggcgtttgtagttttaggtatttaggaggtttggagggcgtttgtagttttaggtatttaggaggtttgaggtaggagaattgtttgaattcgggaggtagaggatgtagtgagtcgagattgtattattgtatttttagtttgggtgatagagcgagattacgtttttaaaataataataataaggtttttagtaggtatgtaattaattgatttttaaaatgattatagtatttattgtggagaatgaattagtgttttttaatcgttttttaaattttatttttcgttttatttttatttattttttttttttttttttgagatagagtttcgtttttgttttttagattggagtgtagtggtaagatttcggttcgttgtaattttcgtttttcgggtttaattgatttttttgttttagttttttaggtagttgggattataggtgtattttattacgtttagttaattagttttcgtttttcgggtttaagcgatttttttgttttagtttttttagtagttgggattataggtagggagttttatatttaaaaaaaaaattgatatttgttttattaatcgtattgtaattaagtttgttagttttttgaagagaaatttggtgttgtaggttttagaagtagttttttatgtttttattgttgattaaattattttttaaaaacgtttttattatatattacgttgtttaaagataaggtataggtttgggatttttgaaagaaaagggtttttttaattattattttttagtttgggatgaagagacgtaaagaagttttttaataaggaaattacgtcgggttttattgttaatagtatagtatttattagtagttgtcgcggttaagaggaagttacggttttttgtagtttgtattttttaagatggatgatttagtttgcgatttgtttaagatggttatagaaatattttcggtattttttcgtattaggttcgttttaatttgcgtgtttttatcgtgtagagggagggatttagagttagtttttgattggttagtttgattggcgattttttttttttgcgatagtttttcgaggtatttagtgtttgagcggtatagacgagatttcgatcgaaggcgagatggcggacgtgttagatttttacgaggttgggggcgaagatttcgttatggatgaggatggggacggtgaggatagtggagacggttggtgggaagcggggaaggtgcgagagaaggttataataggaaaatttattttttttttttcggtcgtaaggatgggaatcgaggaatcgggttttgggtggattagagatttcgttttttttaggagaagggagggcgtgatcgggaaggtattaagattggaggcggtgtgggtcggtttgttggtagtgtattgggaaagagacgattgttataaatgattgttatagttatttatttttttattttttggggttttaga

SEQ ID NO: 288 - DNA, 5362 bp, Artificial Sequence
  chemically treated genomic DNA (Homo sapiens)
tttggaattttagaagataaaagaataagtaattatgatagttatttgtaataatcgttttttttttaatatattattagtaagtcgatttatatcgtttttagttttagtgttttttcggttacgttttttttttttttgaagggggcggaatttttaatttatttaagattcggtttttcgatttttatttttacgatcgaggaaaaaagagtaaatttttttattatagttttttttcgtatttttttcgttttttattagtcgtttttattgtttttatcgtttttatttttatttatggcgaaattttcgtttttagtttcgtgaagatttagtacgttcgttatttcgttttcgatcgagatttcgtttgtgtcgtttagatattaggtatttcgggaaattgtcgtagaggggaaaggtcgttagttaagttgattaattaaaggttaattttaaatttttttttttgtacggtaaaaatacgtaaattggggcgggtttagtgcggaaagatatcggaagtgtttttgtggttattttgaatagatcgtaagttaaattatttattttaggaggtatagattatagggggtcgtggtttttttttaatcgcggtagttgttgataaatattgtattattaatagtgaggttcggcgtaatttttttattagagggtttttttacgtttttttattttaaattgggaaatggtaattgaagaaattttttttttttaaaaattttaggtttgtattttgtttttaggtagcgtggtgtatgataggagcgtttttaaaaaatagtttgattagtagtgagggtataaagagttgtttttggaatttgtagtattaaatttttttttaggaaattaatagatttggttgtaatacggttggtgagatagatattaattttttttttaaatataaaattttttgtttgtaattttagttattagggaggttgaggtaggagaatcgtttgaattcgagaaacggaagttgattagttgggcgtggtggagtgtatttgtaattttagttatttaggaggttgaggtaggagaattagttgaattcgggagacggaggttgtagcgagtcgagattttgttattgtattttagtttgggggataagagcgagattttgttttaaaaaaaaaaaaaaaaagtgaataagagtaaaacgaaaaataaaatttaaaaagcgattaggagatattaatttattttttatagtaggtattgtgattattttaaaaattagttggttatatatttattaaaaattttgttgttgttgttttagaaacgtagtttcgttttattatttaggttaagagtgtagtggtgtagtttcggtttattgtattttttgtttttcgggtttaagtaatttttttgttttaagttttttgagtatttgggattataggcgttttttaagttttttgagtatttgggattataggcgtttttttttatatatatatatatattcggttaatttttgtatttttagtagagacgggattttattatgttggttaggttggttttgaatttttgattttaagtgatttattagtttttattttttaaagtgttgggattataggcgtgagttattgcgttcggtttaaaaattttttttgttagaggggtttggttatattatttaggttggtttgaaattcgttttttaagtatttgggacgataggggtgtaattatgtattcggttttttttttggtattttgttgtatttagaataaaaatttaaatttataaagtttgttttgtttgtgtttttaatttgtttaattatcgtttttttttttaatttatgaagttttttttgttttttcgtttaattgtggtgtgtttttttttattttagggtttttgtaatttggtttgttttgtttttgagacggagttttattttgttatttaggttggagtgtagtgatgcgattttggtttattgtaatttttgttttttgggtttaaggttttttttgcgttagtttttcgattagttgggattataggcgtgcggtattatatttagttaatttttgtatttttagtggagacggggtttcgttatgttggttaggttggtttttaatttttgattttcggttattcgtttttttcggttttttaagtgtttggattataggtatgagttattgtttttcgtagttttttgtttttggtgttttttttttagttttttatatattgggttcgattttatttttttttttttttttttttttttgagatggagtatcgttttgttatttaggttggagtgtagtggtacgatttcggtttattgtaatttttatttattgggtttaagcgatttttttgttttagttttcggagtagttgggattataggtacgtgttattacgtttagttttttaaaatttttttagtagagacggggttttagtatattggttaggttagttttgaatttcgtattttgtgatttatttatttcggttttttaaagtgttgggattataggcgtgagttatcgcgttcggtcgagttcgattttatttttaagattttaatagtattgttatttaaaggggttttttttatttttttgtttttaattgtgtattttttttatagaatttaaattagaatttttttttattttttttttttttttaagataaggttttattttgttaattaggttgagtgtagtggtgtaattatggtttatagtagttaattttttaggtttaagtgatttttttgttttagtttttcgaatatttgggattataggtatacgttattgtatacggttaatttttaaaaaattttttgtagagacggagttttgttatgttgtttaggttagttagaatttttaattattttgtttattttttaatttgtttattgtttgtttttttcgttagaatgtaatttttatagtagagatagttatttataattaaaatttttgaagtttagtttaatgtttggtttatggtagatatttggtagatatttatcgaatgaatgaatattagaatggtaggaaattttgtttgttcgatgttatgtgattggaaaataaagttggaaatatagtttagggtttgttgtgttaaggattttggaatttattttataggtaagaaatttatttattttaaatatttgagtatttatggtttttaatatttgaaaatagtttttatattagttgttgtttattatttttttttaaatagattgattttaaatataaatttatattgaaaggaaaattagtatttttttattacgaatttagataaaagtataattattaaaaattgtttgtttatttattatttaaaattattttaggaatatatataaaattgggaaatggtaggttaggtatggtagtttatgtttgtaaatttagtattttgggaggtcgaggtaggtggatagtttgagtttaggagtttaatattagtttgggtaatatagtaagatttatttttataaaaaatttaaaaagaattatttgggtgtggtggtgtgtgtttatagatttagttattttggaggttgaggtgggaggattttttgagtttgggaggtggaggttgtagtgagttaaaattacgttattgtattttggtttgtttattagagtgagattttgttttaaaaaaaataaaaaaaaattttgggaaatgttgttaaaggtaaagatagtttagtgatggtttaagtaagggagtgttatagttataagtattttataaagaaatatgatagtagtatggaggatgttaagaatggaggtgaagattagttaggaagttattgtagtgatttagtttggagatgagaaaggattaaatttaagtttaggtagtaaatatggataaaatatattaggaggtaggttaggcgtagtggtttatatttgtaattttagtattttgggaggttgaggcgggcggattatttgaggtcgggagttcgagattagtttggttaatatggtaaaattttatttttattaaaaataaaaaaatttgttacgtgtggtagtgggtgtttgtaattttagttatttgggaggttgaggtaggagaattttttgaatttaagaggtagtggatgtagtgagttgatattgtattattgtattttagtttgggtaataagagtaaaattttgttttaaaaataatatatttatattatggtagaggagttgagggtggatttgaggtgtgtggtttaggtaatagtgtagataataattttaataatagatcggcggggtatggtggtttacgtttgtaattttagtattttgggaggtttaggtaggtggattatttgaggttaggagttcgagattagtttggttaatatggtgaaattttatttttattaaaaatataaaaattagttgggcgtggtggcgggcgtttataattttagttatttagaaggttgaggtaggagaatcgtttgaatttaggaggtagaggttgtagtgagtcgagatcgcgttattttattttagtttgggggataagagtaagatttcgttttaaaaataataataataagaataataataattcgaataatttagagagttaaagaggaatgagtatggagaaatgttttttattttcgatatgttttaaagtgtttttgttatatttagatggtcgtgttaagtatgtggaaagtaaatgtaaaagtttaaaataggttggggaggaagaaatagatttgagagttatgtgtatagtggagtttaagttattataatgggtgagattgttagtgggagtaggtagagtttgaggagaaaagattaaggataaattttaggttaaatatttgtagaaagggaggtaggttgttttatgtaattatttttattattttaaaaatgttaataaaattttttttttttttgagatagagttttattttgatgtttaggttggagtgtaattatttagtttcggtttattgtaatttttattttttgggtttaggtaatttttttgttttagttttttaagtagttgggattataggcgtttattattatgtttagttaatttttaattttttttagtagagatgggggttttattatggtggttaggttggtttcgaatttttgatttcgtgatttattcgtttcggttttttaaagtgttgggattataggtatgagttatcgtatttggtttaaaaatttttttttagtatatatgtaaaagaatagggatgttttagagttttttgtggggaaaagaaagggagattaga

SEQ ID NO: 289 - DNA, 6620 bp, Artificial Sequence
  chemically treated genomic DNA (Homo sapiens)
tttgtgaggttttttttttaattttttaaaaggttatttgaaatagtaagttagtaagttaaattttaattttagggttagtataagtattgttatacgatgtaatagtttggtgaattgtgataataattttaaaaagttatttatagttaggtgagatggtttatgtttgtagttttagttttttgggaggttgagttggtagggtagtttgagttgagtttagtttgggtaatatagtgaaatttattttttaagaaaaaagaaaattagtgaattattattacgatgtaattgtttattttttaggttgggtgtagtggtttatgttcgtaattttagtattttgggaagttgaggtaggtagattgtttgagcgtacgagtttgagaatagtttgggtaatatggtaaaattttatttttataaaaaatataaaagttagttaggcgtagtggcgtgtatttgtagttttagttattcgggaggttgaggtacgagaattgtttgaatttaggaggcggaggttgtagtgagttaaacgtattattgtattttagtttgggtaatagagtaagatttttgttaaaaaaaaaaaaaggtagtattttttatattaaaagggtatttagagttgaagttttaatgttttagttataaaggaggtagaaagtttgggcgtgtggtttatgtttgtaattttagtattttgggaggtcgaggtaggagcgtaggaggattatttgagtttaggagtttaagattagtttgggtaatttgtttttttaaaaaaaaaacgaataaataaaattagttgggtatggtggtgtatgtttgtaggtttagttatttgggagataggtaggaggattaattgagtttagaagtttgaggttgtagtgagtttgtttgtgttattgtattttagtttgggtattagagtaagattttgttttaaaagaggaaaaaaaaaaaggaggtagaaaaaatgtttattaatttttgtagtttttattaaaataaaaagattattttggtatggttatgatagaaattttaaattattttagggtttagagtggtatttttttgaagttggggaaaggattttgggtagaaagtaaaggagggggtagatttttggttggtttgatgttttgtaattttgggtttgagttatataagagtatttagtgagttaaggtttaaaggaggagggaataattattttttgggaaagggttatataatttggaatattatagattttttagacgcggagttgagattagagtgttttttatcgtttgatgaaataatttagtttattttaaggacgtgtatttggaaaaatgattggtttttggaaatagtgttattttgttatttaggaataattttgttgattgagttttaataaggaaaataggttttaattaattatattttttaagtgttagaggattcgttagataataattttattataataataagagtatttattgagtgtttattttagggtagtattttatatttattatattatttaattaagaagatttttatttggtattaatttaatattattttggttttgttagttgtggttttatttaggattttgtttaaaatttagagaaatttgattataagaaaatttaataagttataaaatattatatttttttttttattgtattgttttggttgtttaaaaaaatggtttagaaatagtattgtattaatgtttatatttttattttggttattgtattatagttatgtacggtattaaaataagtggtataaaggatatgaggtaataatttgtattaaatttgtaattttttgtaagtttataattagataaaaataaagttgaataatagtttattatttttttaataaattatttattttattttattatggtaaaaagaaatatatgtttaatgtagtaaatattttatatatatataagtaaaaagaagaaaatgaaaattttttaatttaattagttagaggtatttttattaaatatttaggtatatttttattaagatgtgtgtatatggatatatagtatgtatgaattttaattattgattatatttgtaaatgtaaaattttatatttttttattgaatttaattttttttaaatttttattttgtttaatggtaggtaatttaatttagttatttttgaatagtttagttattttaagatttaaagttatttaaatttagtttttagatttagtttttttcgttttatttattagggaggttatatttggattttaattatttaatgtagttatatattgtagatgtaatttattttattttatcgttggggattagtattttgtttttgtttgttagaattataattttgataatgttttttattttttttagggttagaggtttataaggttatttcgggtttttttaatagagttatattagttattttgatttttttattgttttggtatatttttagtttgtaaggttttttttgagatttgtagaatattgaggttattttttgggaaatgtggtatagttttttttttttgtgtaatttatagaaattttgttagattttttagtattttttttttgtgtagattggtttagtgtgatggtattttaggttttttttttaagatttatttaagggatttattttgtaaatttttttgtttgatatttttgaaaatataatataattgaatttttattttttttggagtgaaagaagcgaataaataagtaagtttttatattattttattttttttagtttatgagttatgatataagtttaaaagtttttgtattgaagttagatttttagatatttagattttttttttaaagtttttttttgttgtttggtttttgtttttatattaatggttttaaaattttattttgtaaagtgttaaaaatttttttttttgagaaggagtttcgttttgttgtttaggttggagtgtagtggtttgatttcggtttattgtaatttatgtttttttggtttaagcgatttttttgttttagttttttaagtagttaggattataggtgcgtgttattacgtttgtttaatttttgtatttttttagtagagttaggtttttattatgttggttaggttggtttcgaatttttgattttaggtgatttatttaattcggttttttaaagtgttgggattataggtgtgagttattgcgtttggttagttttaagtttgaaagagttatgtttttatatttggaattttttttttgtttagtgagtatgatttttttatttttataaaatattaatttgagtaatttttggtatattttttaagaatttatttaaaatttggtatattaaaagttgaattgtattgttatttgttttaatatattttaagaagaatatataataattaaaataatttgaaatgttattgtttttattttttttattaattttggttaaatgaaataatatattgttttaaattttattgtttatttatggtttatgattagagattattatagtttatttacgataatgaataaatgtgttttgaaaagttgattatcggtttggtacggtggtttatgtttgtaattttagtattttgggaggtcgaggcgggcggattatttgaggttaggagtttaagattagtttggttaatatggtgaaatttcgtttttattaaaaatataaaaattagttgggcgtggtggcgggtttttgtaatttcggttatttcggaggttgaggtaggagaatcgtttgaattcgggaggcggaggttgtagtgagttaagattatttttattgtattttagtttgggggatagagtaagattttattttaataaaaaagaaaaaaaaataaaaaaaagaaaaaagaaaagttgattatttaatattattgtgttgataggcgtgtaatatggatttttttgtgacgcgtaagtattatttggtagttatatggtgtcgtttgtgtagttgggcgttattattagttttttgttttgtgcgattaaaaggttagtttcggggatagtagtttttttaacgtaaagcgattagttttgttaggcgtcggttgtagttggtttaaggttgacggttttagggtcgtatttttttttcggttattttagattttggaaagagagttatggagggttttagagcgtttttttgtagttttttgaggaaaataagggttttttttttttggttggagtagttaagtgtttacggggaaaatggtttcgtttattattttaggtaaacgtttttatagttgtaataaatatgtgatgggttttttgtattaagaaaggaaaattttttttaaaaataataaaaagaggtggggaggggattttaagttttatttaagattttttaaattcgttgtgttttatgtatacgttgaggtttaatatgaaaatttggagcgaaagtttttacggtttattatagggaatgaagtaaagtatttcgtcggtagttttaggtttcgtaaatcgtggagtttttttagtataaggttttattatgtgttatattagatgagaagaaaataagaggaaggatacggtagagtttttagaatggggtttagttttaggattcgtaggataaaggaaggtcgttttttttcgtttgaggtagggaattaaataaaatatcggtatcgtaggtatcgtagtcgtatttttggggtttcgtggttttttcgcgcgttcgttttgggggcggggaagaattcggatggaattatttttgtagttcggatttttcgtcgtttttgaatggtagcggggcggagttgtttttttttttgtgttttgattggtttggtttcgtattttttttttcgtgattgggtttttttagtgttagttatagagcgacgttggttttttagattgttgtagaaggagacggcgtcgacgtttgattggattcgcggcgatttattttttagtcgtgcgtttttgattcggcgttcggaatttgttttcggttttagggttgcggggtttggaaggaggcgtatcgaggcggttcgaaaacgatttaggggagtcgaggcgttttttttgttattttatttagcgttatgttttggatgtttaagaggtgaagggggcggagggggtggggcgttcggtttaacggtttggaggcgtttttaaatgaatttgattttttcggcgtttttttgcgttttttgggcgatttgtgtagttgtattcgttttgttggtcgtatatgtggtcgtcggagaaataaatgtattgttttcgttggcgagtaggggtttttagggcgagtttcgtgttagggatttgggaaatttttgttatcgattgtggggggtttggggtttaaagtatttcggttagtgttttatttaataaaatatttattagatatttattgtgcgttaggtattgtgttcggtggagggtcgagtaagatagtttttgtttttaagtggtttatagtttatttgtatgtatagacgtgtagataagtatttgtagaggcgttagtagagatatgcgttatttgtaaggaaaacgtatcgtaaataagcgattgtttttaggagaatggaaattttttgtaatgttttagtagatttttttttattttttattgtttaaattggtatttatggttattttcgaaatagttatatttaatgggtttggggttatgtttaaatcggcgacggaaggcgggtacgggtggtttggggttaattttttacggtggcgtggtttggatattagaataggtgttttgttcgtagggagttatagtgatggatgttggatgtattttttggaaaattataaataatttttggtatattaatagttgtatttttataagttttttatatagtttaatttttattgaaattttggtatatgattttattttttaaattatttttttgatatggagtttcgttttgtcgtttaggttggagtgtagtggtataatttcggttcgttgtaatttacgtttttcgggtttaagtgatttttttgttttagtttttcgagtagttgggattatatatgggcgttattacgtttggttaatttttgtatttgtagtagatagggttttataatgttggttaggttggttttaaatttttgattttaggtgatttatttgtttttgttttttaaagtgttgggattttaggcgtgagttatcgtattcggtttataattgtagttatagatattatatatatattaatttagatgatttttattgggaaagaggttagtgaattttgattaggttttttattttgaatatttagggggtaggtagaagagttaatattgaaaataggtagagtttttagaagttttttttatttattgtaatttttgttttaacgagagtaattattaatttttatcgtgatttttatgtaagattttatttgttgaagtaaagtatgagaaaattatttatatggtttttggaaatatttaaatattatattgtttttttttgtttttaaaaaaaaatagg

SEQ ID NO: 290 - DNA, 6620 bp, Artificial Sequence
  chemically treated genomic DNA (Homo sapiens)
tttatttttttttaaaggtaaagaaaaataatataatatttaagtatttttaaagattatatgagtagtttttttatgttttattttagtaaatgaaattttatatgggaattacggtaaagattaatagttattttcgttaaagtaggaattgtagtgagtggagaaggtttttaggaattttatttgtttttaatattggtttttttatttgttttttaggtatttaaaatgaaaagtttagttagagtttattaattttttttttagtgaaaattatttaaattgatatgtatatgatgtttgtaattataattatgggtcggatgcggtggtttacgtttggaattttagtattttgggaggtagaggtaggtggattatttgaggttaggaatttgagattaatttggttaatattgtgaaattttgtttattataaatataaaaattagttaggcgtggtggcgtttatatgtaattttagttattcgggaggttgaggtaggagaattatttgaattcgggaggcgtaggttgtagcgagtcgagattgtgttattgtattttagtttggacgatagagcgagattttatgttaaaaaaataatttaaaaaatgaaattatatgttaaaattttaatagggattgagttatataaaagatttataaaaatataattattaatgtattagaagttgtttataattttttagaaaatatatttagtatttattattgtaattttttgcgagtagaatatttattttggtatttaaattacgttatcgtgggaaattggttttaagttattcgtattcgtttttcgtcgtcggtttaagtataattttaaatttattaggtgtaattgtttcgggaatgattataaatattaatttggataatgaaaagtgaaggggagtttattggagtattgtaaaaagtttttatttttttaagaatagtcgtttatttgcgatgcgttttttttgtaagtggcgtatatttttattagcgtttttgtaaatatttatttgtacgtttgtgtatatagataagttgtgagttatttggggataaggattgttttattcggttttttatcgagtataatgtttggcgtatagtgggtatttaatggatgttttgttaaataaagtattggtcgagatgttttaagttttaggttttttatagtcggtgatagagattttttaagtttttaatacgggattcgttttaggagtttttattcgttagcgaagataatgtatttattttttcggcggttatatatgcgattaatagaacgaatatagttgtataaatcgtttagggaacgtagaggaacgtcgggaaggttaggtttatttggggacgtttttaggtcgttagatcgagcgttttatttttttcgttttttttattttttgaatatttaggatatggcgttgagtgggatgataagaggagcgtttcggtttttttggatcgttttcgagtcgtttcgatacgtttttttttaggtttcgtagttttgaagtcggggataaatttcgagcgtcggattaggagcgtacgattgaaaggtaagtcgtcgcgagtttagttagacgtcgacgtcgtttttttttgtaataatttgggagattagcgtcgttttgtgattggtattaggaaagtttaattacgaagaggagagtgcggagttaaattagttagagtatagaagggagggtaatttcgtttcgttgttatttaaagacggcggggggttcgggttgtaagggtggttttattcgggttttttttcgtttttaaggcgggcgcgcgggaaagttacgaggttttaggagtgcgattgcggtgtttgcggtgtcggtgttttgtttgattttttgttttaaacggagggaaacgatttttttttattttacgagttttaagattgaattttattttaaaggttttatcgtatttttttttttattttttttttatttaatgtggtatataatagggttttatattaaaggagttttacggtttacgagatttagagttatcggcgagatattttattttattttttgtggtgaatcgtggggattttcgttttaaatttttatgttaagttttagcgtatgtatgagatataacgagtttggaaaattttaaatggaatttagagttttttttttatttttttttgttatttttaaggaaaattttttttttttggtgtaggaaatttattatatgtttattatagttatgggggcgtttgtttgaaatggtggacgggattatttttttcgtgggtatttggttgttttagttaagagggggaggtttttgttttttttaaggaattgtagaggggcgttttgaggttttttatggttttttttttagagtttgaggtgatcggaaggagaatgcggttttgggatcgttaattttggattagttgtagtcgacgtttggtagggttggtcgttttgcgttgaggaggttgttgttttcgaagttggttttttaatcgtatagggtaggaagttggtggtggcgtttagttgtataggcggtattatgtaattgttagataatatttgcgcgttatagagaggtttatgttatacgtttgttagtataataatattaggtggttagtttttttttttttttttttttgttttttttttttttttattgagatggagttttgttttgttttttaggttggagtgtaatgggggtgattttggtttattgtaattttcgtttttcggatttaagcgatttttttgttttagttttcggagtagtcgggattgtaggagttcgttattacgtttagttaatttttgtatttttagtagagacggggttttattatattggttaggttggttttgaatttttgattttaggtgattcgttcgtttcggttttttagagtgttgggattataggtatgagttatcgtgttaggtcggtagttagttttttaagatatatttgtttattatcgtaaataaattgtagtgatttttaattatgaattatggatgagtaatagaatttgaaataatgtattattttatttgattaaagttgatgaggaagataaagataatggtattttaaattattttaattgttgtatgttttttttgaagtgtgttgaggtaaatggtaatatagtttagtttttagtatgttagattttaaataaatttttggaaaatatgttagaaattgtttaaattgatgttttgtaagagtaagaaagttatgtttattagataaagaaaaaattttaaatatgagaatatagtttttttagatttaagattggttaggcgtaatggtttatatttataattttagtattttgggaggtcgagttgggtggattatttgaggttaggagttcgagattagtttggttaatatggtgaaagtttgattttattaagaaaatataaaaattaagtagacgtggtggtacgtatttgtagttttagttatttgggaggttgaggtaggagaatcgtttgaattagggagatatgggttgtagtgagtcgagattaagttattgtattttagtttgagtaatagagcgagatttttttttaaaaaaaaaggtttttaatattttgtaaaataaaattttaaagttattggtgtgggggtagggattaggtagtagggaggggttttaagagaagaatttgaatatttagaaatttggttttaatatagaaatttttaagtttatattataatttatagattgaagaaagtaggatgatgtaagagtttgtttgtttgttcgttttttttattttaaaggagataaaagtttaattgtattgtatttttaagaatgttaggtaggagggtttgtagagtaaattttttaagtgggttttagagagaagatttagaatattattatattgggttaatttgtataaagggagaatgttagaaagtttagtaaagtttttgtagattatataagaaaaggaagttatgttatattttttagagagtggttttagtattttgtagattttagagagaattttatagattagaaatgtgttaaggtaataaaggagttaaggtgattgatgtggttttgttaaggggattcggggtagttttgtgagtttttagttttgggaagggtggagggtattattaggattatggttttagtaaataaaagtaggatgttggtttttaacggtgaggtgagatgagttatatttgtaatgtgtgattgtattagatgattggagtttaaatataatttttttggtgggtaagacgaagggaattaaatttgaaagttgaatttaaatgattttaaattttaaaatgattgaattatttagaagtgattaaattaggttatttgttattaggtagaatgaaggtttaagaaaaattaagtttaataaagaaatataaagttttatatttgtaaatatagttagtgattgaaatttatatatgttatatgtttatatgtatatattttgatgaagatatatttagatatttaatagaaatatttttagttggttaaattagggaatttttatttttttttttttatttatatgtatataaaatatttgttatattaaatatgtatttttttttgttataataaaataaaatgagtaatttattaaagaaatgatgaattattatttagttttatttttatttaattgtagatttatagaaaattataaatttagtataaattgttgttttatattttttatgttatttattttaatatcgtatataattatagtataatgattaaaatgaggatatgaatattggtataatattatttttgaattatttttttaaataattaagataatgtagtggaaaagaaaatataatattttgtgatttattaaatttttttataattaggtttttttagattttggataaaattttgagtaaaattatagttgatagggttaaagtgatattaaattaatgttaagtaaaaatttttttaattaaataatataatgaatatgaagtgttgttttggagtaagtatttagtaagtgtttttattgttgtaatagagttattgtttaacgagttttttagtatttaagaaatatggttgattgaggtttattttttttattgaggtttaattagtagggttgtttttaaatagtagaataatattgtttttagaagttagttatttttttaggtgtacgtttttgaagtagattgaattgttttattaagcggtaggagatattttaattttaatttcgcgtttgagaaatttgtggtgttttagattatatagtttttttttaggagataattgttttttttttttttaggttttgatttattaaatgtttttatgtggtttaagtttagggttgtaaggtattaggttagttagggatttgtttttttttttgttttttgtttagggttttttttttagttttagggaagtattattttaggttttggaatgatttagggtttttgttatggttatattaaagtaatttttttattttaatgaaaattgtaaggattaataaatattttttttgttttttttttttttttttttttttaagatagggttttgttttgatgtttaggttggagtgtagtggtataaataagtttattgtagttttaaatttttgggtttaattgatttttttatttgttttttaagtagttgggtttataggtatatattattatgtttagttaattttgtttgttcgttttttttttggagagataggttgtttaggttggttttgaatttttgggtttaagtgatttttttacgtttttatttcggttttttaaagtgttgggattataggtatgagttatacgtttaggttttttgttttttttatggttagaatattaaaattttaattttaaatgtttttttgatataagaaatattatttttttttttttttgataagagttttgttttgttgtttagattggagtgtagtggtgcgtttagtttattataattttcgttttttgggtttaagtaattttcgtgttttagtttttcgagtagttgggattataggtgtacgttattacgtttggttaatttttgtgttttttgtagagatggggttttgttatgttgtttaggttgtttttaaattcgtgcgtttaaatagtttgtttgttttagttttttaaagtgttggggttacgggtatgagttattgtatttagtttagaaagtgagtaattatatcgtagtagtaatttattggttttttttttttttagaaaataggttttattatgttgtttaaattagatttaatttaggttgttttattaatttagttttttaaggagttgggattataggtatgggttattttatttggttgtaaatgattttttaaaattattattataatttattaaattattgtatcgtatggtaatatttatgttaattttaaaattaaggtttaatttgttaatttgttattttaaatagttttttagaaagttaagaaaaaaattttataaa

SEQ ID NO: 291 - DNA, 7823 bp, Artificial Sequence
  chemically treated genomic DNA (Homo sapiens)
aattttaaatttgtttttatttttgataagttttattaaagtttattaaatttttgtttttttatttgttaattggagataattatgatatttaattttatggagtgttgtgaggattaattaaaataatgtatttgaagtttttggtattatgtttggtatggaggtatatgattatgatttgtaaattgtaatgtttttgagatggtagtagagggagtagagttaatgggaattggattttagaaaattagtaagattgatattaaatttttttataagataatgtttttgttttgatggagttagagtaatttgtatatagatgagtcgatgagatttatattaggttattttattttaataatttttgttgttttatttatgtggtattagtatatgtaattagggaatttaacgtatttttttgcgtgtatatattgtttgtttaatttttaattttagtttattttagtttttttagaatatttaagaggggagaggagaagtatggtgatattataaaattgaaattagtaaatgtttatattttttgtataaaaattgggagaaggtggagttggtttattttttttatagcggtaagagtgatattttttttttttttttttttgttttttataaaagtagttttattgggtagagtgggaaaagtataattagaatcgattttgaatttattttattttttatttataattgtgaatttgtttattttatttagattttttttatttttattttcgttttgtatagtaaggtggtagggaagttggagggttaatttggtgagtgttaaagttatttataatttgtttattattttattattaatagttattgatttagtatttaatttgattttattttttatattatatttttgattttttttagtaattttaggtgggatataatatttttatttttatagatagggagttttggggttagagaagttaggtaatttatataattttgtgttattagaaattgatatattagaattagaagttatttttttgaaagtttttaatttgggattttttttttagtatgatgtagtaaaaaattagatatagggtttattattagggtaattgggtggttgtttgagaaaggagataggaatttgtgggggtttttgaatttggaaaattttttaggggttttattttagtatttggtttgttttttattttatttcgaatttttttatgtttttgtttttgagggattgataaggttagggttagtgtagggttaagaaattgtagatttgtttatttagttttgattttaaaaaagagaaataaattggatatagaagcgtttttttttagatgtttttttttatttatgaaatatagaaggaagatagaggtttaaggtagaagatttaattaagaaaaaagtgcgtatttgggtagagagttttttatgatagatatttttggataaacgagttatagttggtagtatatggtaaatagagtagaggttttttaagtgttatttgtagatttttgggagtggttttcgagatttttttagagtatttgtaaggttaaattatttttataataatattaatatagttttgtttttttattttgttgatatttgtattaatggtattaaagtaaaggtgggtgaaattgttggggttttagtataaagtaaggaagtggtgttaaattatattagtagttgtatattttattattatgtatttataataaaatgttagtttgatttaagaatgtttttgatgaagtagtaaaaattattaattttattaaattttagattttaagtatacgtttttttaatattttttgtgatgaaatggaaaaggtatatattaaaggatgatggttatttcgaggaaaagtatttgcgtgattgtttgagttgttaagacgagtttgttattttaaggaaaataattggtagtatttgttgttaataataaaattgagtttttaagtaaaaattagaatttgagtttgattgttttttagtatttaaaatatttatatgatgagattaatattgatattatttgatatgaatttttgaatattgtatgatgaaatgttgtatttattgtatgatgaagtaggtagtatttagaaaatttgtatattttagtggattaatgttttttaaatgattagtgtttgatattgtaaaataatttgtgggtaatagttttatttaaaatatatataataaaagatttgaatgtaatagtatatataaagtatatgtttatataaagtatatataaagtatatgttgataaggttttagattttataatgtaattagttttttagaaattattatttattgagttttgatgtggtattaaagaagaataattatttgaaaaggttattataatattttttttttttaattatataaatgtgtgagtttatattttttttaaatatgttaattaaaataatattttgtagtagattaaatgtagaaatagatatgagaatttagttgtttttttttaaattagatattaaagagatttttaaaatgttattttttttattacgttttttatgttggaagatatatttgttttttttaaaatatgtttaatatggagtgggtttattattgttattttgaaggaataaatatatattttaatttttttttagatttaagttttaatatagtaaataaaaattttatttagaatagtaatatataaatattttttgggtttgttaataatttttaagggaataatggtattttgagaataaaaggtttaaaaattgttgtggaagtcgtaaggtaaggttttgaaaaggaggaggagaataaattttgttttgtatagtaggtatttaataattgaatatgataatgataaggatatgtaaaattagtgtgattaatattatgaggtaggaagtgaaaagtgttaaataagtggtttagatgtgtattgtttaatacggtagttattagttatatgtggtttggaatgtggttagttttaattgatatgttttgtaagtgttaaatatatattagattttagagattgagtatgaaataaggaatgtaaagtattttattgataattttttatattgattatatgttaaaatgttaagatttttgtatatattgggttatttataatattaaaattaattttatttgtgttttttttttttttaatatggttatgagaaaatttataattatatatgtggtttatattttattttttttggagagcgttggtttggataggaagtatgaagaatttggagtagggaaatattgttgtgggtttaggttatcgggaagtttttattgagaattataggattttattaagtaggtaggtttagggaggaatatttagttgaagaaagtttcggtagtgaaatatgaggttaatttgggtagttgaggtgattgtttgggttatattatgggtttttataggggagaaaagttttttggataggttgggattaaattgtatagaatttaaattgttaagaatttggattttttttttataggtagtgatagtttttttagaagaaaattagattttgtttagtagtttatggaatagtttgaaattggtatttttttatgtagggttagagtagtataagtttttggaaattgtttgtttaataagtagtggggattaggtttatttaattaggaaatttatagtgatatggaaagtgtgattttggattgattgatttatttgggggtgggtggtaagtttaagtatatgataatgttatttgggagagaagaatttagagggtgtatttgtgtgaaattcgttagggaagagggaggtaggttttttattttggtatattgttttaagtatgtgtataattaaattgagtgatattttttattttttttttagtttgtttgtttgtttttatttttgtttttgttttattatttttatttttttaaatatttttattgattttttaatatacggtgggattttattgtgttgtttgggttggttttaaatttttgggtttaaggagtttttttattttagttttttaaagtgttaggattataggtgtgagttatacgtttggatttttttttattttattgaatttttattgtgaattaaggggttaagagttaattataaggagatgaaatgaaaagattattgaagtgggaagggaaatatttgggttattatcgggtttcgtggttaatttattgagtttttttggttattttattgggtttttttagatatgaaagaggatttagtattagatgggattaagattttttttaattttgtgattttagaataggttgatgttataaagggagaagaacgtatcgtagtaattaggggtaaggttatttaaggagagtaggaggaggttaggttaggaagggtaagtattggtggtttatttaggatttggtttaattttttgggttaggttattttcgtcggagtgagcggatttcgttggaattggagtttagtaaggtttatgagtttggtgttttgattttggttatttattttttttattttaggggtggtttattaggttgagtggagttttatattagggagagaggaagttgaagaattgggttttaggtaagtaattttgtagaggattttagattgtttaaggaaattattgaagaaaatgtatgtttcgtttttttttttttttttggtattgttgagttatttgtagttgcgagagtcgttgggagggataagagggaagaggacgttcggtgaaggggttttagtttggtagtttttgcgtgttagtatttttagaatagagtgggtgggaattgatttaagtaaagttttagagattcgaatattgacgtataggaaagttttaagtgggaggagaaatgtaaattttttattgatgatggcgttagcggtttttttttagggattgtgaggggcgtttttgattttggatttgagtattgtttgggatttgtgttgagagagcgttaggtaagtggttagattatattttttggttgttttttgtaaggaggatatgtttattatgtaggatattttgaagttttgtttttttttggcgttttgataattgttttattttaatttttttgaggaggtttattatagaaggaagcgttcgattttacgatttatagatgcgttttggtacgggtttttcgcggaaatcgtttcgtaggttcgcgttacggtgttcgggcgaatttttttgcgggggttaggggagttgcggcggttgcggaggtgtgttttcgcggaggttgaaagtgagtttttttttatttttttagttagtttttttagagttgtgatgtttgattttagattagcgtatttggattttagaaaaaagtttgtagttacggtagtcggtgattgtggttttgatgggcgcgagtgatattttagggtaggttatttttttttgtaagttataggttatagagttaaagcggtattattagtttatagacggtgggataaaatgtttttttagtgggattttttaggaaatgtacgtaaaaaggatagataggtattgagtttttagaagtaacgttatagtttttatgagaaagaagtagtttttagagagtgaaagtaaagaaatttgttgaaggatgtttaaaggcgtttttagaggttgtaatagaaaatgttttaggattatgtatttttttttttttttttttttagttttgaatttagtttttcgaaagatttagattttagtagtgatttttttcggtgtttatttttattttttttaattttttttttatttttatttgatatataattgtaaatatttatggaatatatagtgatattttaataaatatgaataatgtgttatgattaaaggatatttagtatatttattattttaaatatttattattattttgtgttgtgaatatttaaaatttttttagttttttgaaaatatatattaagttattgttaattatatttattttagtgttatagtattagaatttattttttttatttatttgtaagttttagttagaaaatagattttttatttaaattatagcgggggtttaataatagtatgatgaaaaattgtaatgttatttttaatttatgttttttgttgttattaattaaaataaattgatagataggataatgttgatagtagtatgagaataaatgttttaattttgtgtggaatatatatatattcgatggaatatatatatattcgatatttggaaaaataaatggtttagatttaggaaattttaggttgttttttagaagttttatatattaggtaggcgttatttcgtttatttgatttttaagttttttttttttaaagttgatatattatttatatttatttattatatttatagtaatgttaggagtgttatttattttttatttaataagtattgattgagtatttataatatgtttagaattgtaaagtgtaaaggtttttataaatataaaatgatatgtaaataaaatattatttttttttttatttgttttttttttagtaaaatattggtaatacgtttttttataaattttaagttatttattaggagtttagggaaaaggtgtttaaaatgattttatttaaaatttaaagaatatgtatatgaaatatatgaaattattttggtgttttataggtaaaaggaaattttagtttatttatgagatatgttgaaatgttatggtgattaattatgtaaaagggggtttggtgtttttatttgatttagaattgttgagaaaataattaaaaatttgattttggaaaatataaaatgttgtaattttaaggaggtagcgttatattaatttttttgagttaggaaatatgtttatagtttttaaattggttagagtggggttataagggggaaatgcgtattttttttttatgataggttgttaaataggtattaagtgtggttttttattttttaagtaatttgagggtttaattattattagatgttttttagagataaaaagattatattttttaagagttttgtttatttataatggatttttatagagagaaatgaaatatatttattggtttagaaatatttttaatttaaaaaattggagtttacgaaaatgtatatataaaattttttatgaagttaagataaaattggattagaagttaagaatataaagttgattttagaagttagataaatttgaaataaagaaaaaagaaatttggtaattttatataaaagaagttttttggggggttgttttttatatataaagttttagagggttttaggaggtatagtaaatgttaaatacgtttgtttttaagttgttttaagtttaaatgttgaggggataagagatagggaaagagtttgttgataatagaaatttatatagatagttgtgggtaggatgtggggtgtttggtagagtgggagtgaaaattttttggagtaggtagaataggagtttattttagagtaaggaaggttgtagtttaggggtatagaaagaaggttgttttttttattagggttgaattatgaaaaaaaattttagtgaaatttttgtatttttggatatattggaatttagttataatattgattaattttaaggaaagaagaaaatatgtattagggttatgaataatattttaaaattttaattttatatttttttttatagt

SEQ ID NO: 292 - DNA, 7823 bp, Artificial Sequence
  chemically treated genomic DNA (Homo sapiens)
gttataaaagaaggtgtagaattagagttttaaaatattgtttatagttttagtatatatttttttttttttttagaattagttaatgttatgattgaattttaatatatttaaggatataaaaattttattaaggtttttttttataatttaattttaatgaagggagtagttttttttttgtgtttttaaattatagttttttttgttttaaaatgaatttttgttttatttgttttaaaaagtttttatttttattttgttaaatattttatattttgtttatagttgtttatgtgaatttttattattaataagttttttttttattttttgtttttttaatatttagatttggagtaatttgaaggtaaacgtatttgatatttattatattttttaaaattttttaagattttatatgtgaggaataattttttaagaagttttttttatatgaaattgttaaattttttttttttttattttagatttgtttggtttttagagttagttttatgtttttgatttttagtttaattttgttttagttttatgaagaattttatgtatgtattttcgtaggttttagttttttaaattaaaaatatttttgaattagtgaatgtgttttatttttttttgtgaggatttattatagatgggtaaagtttttaaaggatgtagtttttttgtttttgagaaatatttgatagtggttaaatttttaagttatttaaggagtaagaaattatatttgatatttatttggtagtttgttataaaagaaaagtacgtattttttttttgtaattttattttggttaatttagaagttgtagatatattttttaatttaggaaaattagtatgacgttgtttttttgaaattatagtattttatgttttttaaagttaaatttttggttgtttttttagtaattttaagttaagtaaaaatattaaatttttttttatatgattaattattataatattttaatatattttatagataggttaaggtttttttttgtttatagaatattagggtaattttatatattttatatatatattttttgggttttaagtagaattattttgagtattttttttttgagtttttggtaaatgatttaaaatttataaaaaaacgtgttgttaatgttttgttaaagagaaagtaagtgggaaaagaagtaatgttttatttgtatattattttatatttatgaaaatttttatattttataattttaggtatattgtaaatgtttaattaatgtttgttaaatgaagaatgagtggtatttttgatattgttatgaatatggtaggtggatataagtagtatgttaattttaaaaaggaaaaatttgaagattaaataggcgaaatgacgtttgtttaatgtgtgaggtttttaagggataatttgaggttttttgagtttgaattatttgtttttttagatatcggatgtatatatattttatcggatgtgtatatattttatataaaattggaatatttgtttttatgttattattaatattgttttatttattaatttattttagttaatgataatagagaatatgagttgaaaatagtattatagttttttattatattattgttaaattttcgttatgatttggatgaaaaatttattttttaattaaaatttataggtagatgggaggaataagttttagtgttgtaatattaggatgaatatggttaataataatttagtgtatatttttaaaaagttaagaggattttgaatgtttataatataaagtaatgataaatgtttgaggtgatggatatgttgaatattttttgattataatatattgtttatatttattgaaatattattgtatattttataaatatttataattgtgtgttaaatgaaaataaaaggaaaattaaaaaaaataaaaataaatatcgaaaaaaattattattaagatttgagtttttcggagagttgaatttaaagttgaaaaaaggaagaagaaggaatatatagttttaggatattttttattgtagtttttgggaacgtttttagatattttttagtaggtttttttgtttttattttttaggggttattttttttttatgaaaattgtgacgttgtttttgaaaatttagtgtttgtttgttttttttgcgtgtattttttagaagattttattaaaggggtattttgttttatcgtttgtgagttggtggtgtcgttttggttttgtggtttgtagtttgtaaaaggagatgatttgttttaaaatgttattcgcgtttattaaagttatagttatcggttgtcgtagttgtaagtttttttttgaaatttaggtacgttaatttaaagttagatattatagttttagagaagttggttaagaaagtgaagaggggtttatttttagttttcgcgaggatatattttcgtagtcgtcgtagtttttttggttttcgtagggagattcgttcgggtatcgtggcgcgggtttgcggagcggttttcgcggagaattcgtgttagggcgtatttgtgggtcgtggagtcgggcgtttttttttataataagtttttttaggaaggttaaaatgaagtaattgttaaaacgttaagggaaagtaaagttttagagtattttgtataataagtatgttttttttataagaggtagttagaaggtgtggtttggttatttatttagcgtttttttagtataggttttaggtagtgtttaagtttaaagttagaagcgttttttatagtttttaggagaaagtcgttgacgttattattagtaggggatttgtatttttttttttatttgaggtttttttgtgcgttagtgttcgagtttttgggattttatttgggttagtttttatttattttattttagaaatgttaatacgtagaaattgttaggttggagtttttttatcgggcgttttttttttttttattttttttagcggttttcgtaattgtaggtggtttagtagtgttaggaaaaaggggaggggcggggtatatattttttttagtggtttttttagataatttgagattttttgtagagttatttatttggagtttagttttttagttttttttttttttagtataaggttttatttagtttggtgaattatttttgggatggaagggatgggtagttaggattaaaatattaaatttatagattttattgggttttaattttagcggggttcgtttatttcgacgagggtgatttgatttagagggttgggttaagttttgggtaggttattagtgtttgttttttttgatttagtttttttttattttttttgagtagttttgtttttggttgttacggtgcgtttttttttttttgtgatattagtttgttttagaattatagagttggaggaagttttggttttatttaatgttaaatttttttttatatttgaagagatttagtgaggtgattaagaggatttaataagttagttacggagttcgataatagtttaggtgtttttttttttattttagtggtttttttattttatttttttgtagttagtttttaattttttgatttatagtaggggtttaataaaataaagagaagtttaggcgtgtggtttatatttgtaattttagtattttgggaggttgaagtggaaggattttttgagtttaggagtttgagattagtttaggtaatatagtaaaattttatcgtatattaaaaaattaataaaaatgtttaagaaagtaaaaatagtaaaataaagataaaaataaagatagatagatagattgaaagaaaggtagaaagtgttatttaatttggttatatatatgtttagagtaatatattaaggtgaaaggtttgttttttttttttttgacgggttttatataggtatattttttggattttttttttttaggtgatattattatgtgtttaaatttattatttatttttaaataggttaattaatttaaagttatattttttatattattgtaaattttttggttaggtaggtttggtttttattgtttgttgagtaggtagtttttaggagtttatgttgttttgattttatataagaaagtgttaattttaggttattttataagttattaagtaaagtttgatttttttttggagaagttgttattgtttataggaaaaaaatttaaatttttggtagtttaagttttgtatagtttggttttaatttatttaggaaattttttttttttataagagtttatgatgtgatttaagtagttattttagttgtttagattaattttatattttattatcgaggttttttttaattggatatttttttttgagtttatttatttagtgaaattttatagtttttagtgaagatttttcgatgatttgaatttatagtaatgtttttttgttttaaattttttatattttttgtttaaattagcgttttttaagagaaataaaatgtaagttatatatgtaattgtaaatttttttatagttatattaaaaaggaaaaaagtataggtgaaattaattttaatattgtaaataatttaatatatataagaattttaatattttggtatataattaatataaaaaattattaataagatattttgtattttttattttatatttaatttttgaagtttggtgtatatttagtatttatagggtatgttagttaggattagttatattttaagttatatatggttagtggttgtcgtgttggatagtgtatatttagattatttatttagtattttttattttttgttttatagtgttagttatattggttttatatgtttttattattattatatttaattgttgagtgtttgttgtataaaatagagtttgtttttttttttttttttagggttttattttgcggtttttatagtagtttttaaattttttgtttttaagatattattatttttttaaaaattgttgataaatttaaggaatgtttgtgtattattgttttggatgaaatttttatttattgtgttaaaatttaaatttgagaaaaaattaaaatatgtatttatttttttaaaatgataataataaatttattttatgttaaatatgttttaagaaaaataaatatattttttaatatgaaaaacgtaatgagaagagtggtattttaaaaatttttttaatgtttggtttgagagaagatagttggatttttatatttgtttttgtatttaatttgttgtaaagtattattttggttgatatatttgaagaaagtatggatttatatatttatgtagttggaaaaggggagtattataatgatttttttaaataattatttttttttgatattatattaaaatttaatgagtggtagtttttgaagggttagttgtattgtgaaatttgaaattttattaatatatattttatgtatattttatgtaaatatatattttatgtatattgttatatttaaattttttgttgtatatattttgaatgaaattattatttataaattattttgtaatgttagatattggttatttaaaaaatattggtttattgaagtatgtagattttttaaatgttgtttattttattatataatgaatataatattttattatatagtgtttagaaatttatgttaggtaatattaatgttgattttattatgtaagtattttaaatattgggaagtagttaagtttaaattttaatttttgtttgaaagtttagttttattattggtagtagatattattagttgttttttttaaagtgataggttcgttttggtaatttaaataattacgtaagtgttttttttcgagatgattattattttttaatatgtgttttttttattttattataaagaatattaaaaagacgtgtatttaaggtttgagatttaataaaattaataatttttattgttttattaaaaatatttttaagttaaattggtattttattgtaagtgtatggtggtgaaatatataattgttagtataatttggtattatttttttgttttgtgttaaggttttaatagttttatttatttttgttttggtattattggtgtaaatgttagtagggtgaaaagataaaattgtattagtattattataaaaatagtttaattttgtagatgttttaaaaagatttcggggattatttttagggatttgtaggtaatatttagagaatttttgttttatttgttatatgttgttaattgtaattcgtttatttagagatgtttattatgagggattttttgtttaaatacgtattttttttttggttaaattttttgttttgaatttttgttttttttttgtattttatgagtggaggaagatatttaagaaagggcgtttttatgtttaatttgttttttttttttagaattaaaattaaataagtaggtttgtagttttttgattttatattggttttggttttgttagttttttagagataaagatataaaaaaattcgaagtaaaatgaagaataaattaaatgttaaaatgaaatttttggaaggttttttaaatttaaaggtttttatagatttttgtttttttttttaaatagttatttagttgttttggtgataagttttatatttaattttttgttgtattatgttaagaagaaaattttagattaaagatttttagaaaagtagtttttagttttggtgtgttaatttttagtggtataaagttatataagttatttaatttttttaattttaaaattttttgtttataaaagtggggatattatgttttatttgaaattgttgggaaaagttaaagatataatgtaagaaatgggattaggttaaatgttgaattaatagttgttaataatagaataataaataagttatgggtaattttggtatttattaggttaattttttagtttttttgttattttgttgtatagagcggaaatggagatgaagagagtttgggtgggataggtaggtttatagttgtaaatagaagatagggtggatttaaaatcggttttgattgtgttttttttattttgtttagtggagttgtttttgtgggaaatagagagaggaagagagaggatattatttttgtcgttgtaagggaggtaaattagttttatttttttttaatttttgtataaagaatataaatatttgttagttttagttttgtgatattattatattttttttttttttttttaagtgttttgaggaaattggggtgagttggagttggaggttggatagataatatgtatacgtagaaagatgcgttgagttttttggttgtatatgttagtattatatgagtgggatagtaaggattattgggataagatggtttggtgtgaattttatcgatttatttgtgtgtaggttgttttagttttattagaataggaatattgttttgtaaaagggtttaatattaattttgttaattttttgaagtttagtttttattgattttgttttttttattgttattttagaagtattgtaatttataaattatagttatatatttttatgttagatatagtgttaagaattttaaatgtattgttttagttaatttttatagtattttataggattaaatattatgattatttttaattggtagataaggggatagaggtttagtgagttttagtgaggtttattagaggtaaggatagatttgggatt

SEQ ID NO: 293 - DNA, 5265 bp, Artificial Sequence
  chemically treated genomic DNA (Homo sapiens)
  unsure (167, 490, 492)
taaagattttttttgttatttgtgagtttgttatattatatttatggttttatttgtttttgatttgaataaggataattttataggttgggtatggtggtttgcgtttataattttagtattttggaatgttgatatgggggtattatatgagtttagaggttggnagattagttggggtaatatggtgaaattttgtttttattaaaaatgtaaaaattagttaggcgtggtggtgtatgtttgtggttttagttattgggaaggttaagatgggaggatggtttgagtttaggaggtagaggttgtagtgagtttaagattgtattattgtaggaggttatttaggaagttgaggtgggaggattgtttgagtttaggagatggaggttgttgtgagttaagattacgttattgtattttagtttgggcgatagagggagattttattttaaaaaaaaaaaagttaaaagtaaaaaagagttatttntnttatgagatttattaagttgaagttacgttagtattattaaattttgtattatttaatatggtagtaattaattatataggattatttaaaaatttttgttttgttttttgagatagggtttttgttatttagattggagtttagtggtatgattttagtttattataatttttgttttttaggtttaaggatttttttattttagtttttagagtagttgggattataggcgtatgttattatgtttagttaatttttgtatttttagtagagatagtattttattgtgttggttaggttggtttttaatttttaattttatgatttgttcgtttcggttttttaaagtgttgggattataagcgtgagttatcgtattcggttaagtttggtaatattttaaatgagttgttattaagttttatttgattatttatatatatttggattttagattttattattattgtttaaatttagttttttattttttattatttgaattattgtataaatttgtttttttatttttaaatttatttgtaaaatattatttatgttatggtatttttgaaatgtattttattatattgtgttgagggaaagatatttggtggcgatatacgacgttttttattagtaggaatagatatttaatatttaattgtggttaatgtttaaatgaaatttatagattagtttggttaatatggtgaaattttatttttagtaaaaatataaaaattagttgggtatggtggtatacgtttgtagttttagttattcggaaggttgaggtaggagaattgtttgaatttgggaatttagagattgtagtgagtcgaaattgtgttattgtattttagttttagcgatagagcgagattttgttttaaaaaaataaaaaataaaaaaatataattgttttttggtatattttagaggagtggttttatgatttttttattattaagtatattaaaattagatagaatttttcgtatttatgggtttggtattttataaatattgtatttttgatttgtatttggttggaaaaaatttatttaaaaggggtttaaatttatgttgtttaaggtttaagtgtttaaggatgatagaatgtaggggttagaataggtttttataaaaatttttagaatttattgttaaaattttttattttattgttattttagaattttattttagttgtttttttatttgtataggttgttagattcgattaggaagttttattttgtattttttattatatttttagttattaatttatttaattattattaaagtaattagatgttaagttttttataaagtgttagttttttttttatttagtttatatttttttttatttggtataatgttgggtgatttataaataaaaaattgtatttttaaaaattttttaaaagaatttttgttaaataggagaaattttaattagtttagaattaaaatgggggagaaaatttttatgttattgtagtaattatttttaatttgttttttttggaaatagttaagtttagggaatcgtatagtattaatattataatttattaatatggataaaaaatatgttatatttatttatttaaatttaaaaaattttatttataattttaaattgattattttttttttttgagagggggttttgttatgttggttaggtatgagttattacgtttagtttagaatattttttgagatagtttcgttttgtcgtttaggttggagtgtagtggcgttttaatggtgtgattatagaattgagttattttgttcgttttagaaaatgtttttaatagaagttttgaattagagatgaggtataacgtataaggtttgatatttaagtaataaggattgatgaaaatttgtttaaatgtttgaatataaaatatttaaaattatagttaggtgatatatagtgatatatattttaatattggtatttgtggaggttaaggtaggtatattatttgagtttaggagttcgagattagtttgggaaatatggagatttatttttataaaatatatgaataaagtttattaggtgtggtgtttgagatatgattgtattattgtattttagtttgggtaagatcgtttttttgttttgagatggagttttatttgtagtttaggatggagtgtaatggtataatttgggttgattgtaatttttgttttttgggtttaagtaatttttttgttttagttttttgagtagttggggttataggtatgtatcgttacgtttggttgatttttttggattattagtagagatagggttttattatgttggttaggttagttttgaatttttgattttaggcgattttttcgttttagttttttaaagtgttaggattataggcgtgagttatcgtgttcggtttttgagatatttgtttatagaaaagttcgtggtgtaattttggtttattgtatttttaatggtttaggtttaagtgatttttttattttagtttttagagtagttgggattataagaatatgttattatatttagttatttttttgttaagatggggtttcgtaggtcgggcgtggtgatttttgtttataattttagttttttgggaggtcgaggtaggttggagttcgagattagtttagttaatatggtgaaaatttagttttattaaaaataaaattagttgggtacgtggagtgcgtttataattttagttagttaggaggttgaggtaggataatcgattgaatttggagggtggaagttgtattgggtaatagggtaatatttcgtttttaaaaaaaaaaaaaaaaaaaaaaaagggagttttattatattgtttaggttggttttaagtaatttgttcgttttagttttttagagtgttgtgattaaaggtaggtgggagttatcgtgtcggtttgtataatgcgttttaaggttgggtagtaagttagtgaattattaatttttaaaattgaagtataaattttttgaagaaaaataagtttttttaaaatgtttttttttttgaagttaagaattatatatcgtaatatattatgcgtatttattatcgtattttttattaagtttttgttttatgtttgttttttttagtttgtgagttttttgagtttagtaattatttgaaatattaatttttgtattattagtattttaattgtttgtaatataggttttgaatatttgataaagaaatattaaaatatatagtgtttttatattatgataaatatagaagttgtgagggaatgaaaattgttaaaatgtagaagtttaaagatttaggaggataatatatttagttttattttaattaaattatataatatttttttttttaattgttgtaaagtgtatttataatatgttattatagatttatttttaaaaggttttttgtgatattatagtaagtttttttttttaaatagaggaataattttaaatttttttttaaataaattttattttagtaaatggtaaatatataaaaattatagtaagttagatatttaaaaggatagttaagaagttttttaatagtttattagaaagaatgtagatatttaaaaaaatttttattgttatgaatataaattgaggtttttagttcgggtataagttgaattaaaaaaaggaaataaaaaatttaatagtgtattaaatattttttatttatttgttatattgatagtgtaaatataaatttggattaaatgtatagatttttaagtaataatgtatagtttttttcgttttttatgttaagagatgtaaaagtttaagggttaaataatattaattgtataggttttaaaaattatttaagttagggtattttttagttttagttaagatatatttggaatattgataagttattatttatatagaataatgtgaagtaaattttttgaaaaataaattttagtggaataattttgaaggataatattagaagaatagtaggttattagtaaggtgttagttaatttgttttagttatttttgaatttatgttttataatttaaaatttattttttttttttaagttgagagttttttattatgttagtatttatgttatgaagaaaaggagatttaggtgagatgtttttatttatcgtaattgttgtattaattgtttaggattttaatagttttatgaaagtttgggaaatgtttatgtataaggttattgttttagttgatttaaaattgttttatataatggtatatattaatttttagtgaagttttttaaaaaataaataggttgaaaaatgggttaaagtaggtaaatatagtatatttgtttttagagttattaatttaggaatttttttaattatgaaattttgtagagaagttattttttttttttaaaatttaggtgatgataatattttttattttagatttggtatttttgaaagaatttttaaaaatattagtatatagtataagtgaataatttattaattttattgttttaaaggaaaagtaattaaaaatcgaaatatatagttgtttaatgaattaataggttgttttgttattaagttatttatatttttgttttggttatttatttaaggttataaagaaaaaattattttatttttaaagaagttaatatttttattttgagtttgttttttgatgtaaagtattattgtataaatatattttttatatatatttatt

SEQ ID NO: 294 - DNA, 5265 bp, Artificial Sequence
  chemically treated genomic DNA (Homo sapiens)
  unsure (4774, 4776, 5099)
agtaagtgtatataaaaagtatgtttatatagtgatattttgtattaaaaaataaatttaaaatagagatgttaatttttttggaagtaaagtaattttttttttatgattttgaataaataattaaagtagaaatgtgaataatttgatagtaagataatttattaatttattgggtaattatgtatttcgatttttggttgttttttttttaagatagtaaaattggtagattatttatttgtattatatattaatatttttaaaaatttttttagaaatgttagatttggagtaaggaatattgttattatttggattttgagaaagaaaaataatttttttgtaagattttataattgagagaatttttgagttgatagttttaaaggtagatatgttgtatttgtttattttaatttattttttaatttgtttgttttttaaaaggttttattaagggttgatatgtattattgtatggggtaattttaagttagttaaggtaataattttatgtatgaatattttttagatttttatgaagttgttgaggttttaggtaattaatgtagtagttgcgataaataaaaatattttatttaagtttttttttttttataatatagatattgatatgataggaagtttttagtttagggaaagagaataaattttagattatagaatatggatttaaaagtgattggaataaattggttgatattttattggtaatttgttatttttttggtgttattttttaggattgttttattaaaatttattttttaaaaaatttattttatattattttatgtaagtgatgatttgttagtgttttaggtgtattttagttaaaattagagaatgttttaatttagatggtttttgaagtttatataattggtattgtttgatttttaagtttttatattttttagtatggaggacgaagaaagttgtatattgttgtttgagagtttgtatatttagtttagatttgtatttgtattgttagtatggtaaatgagtgaaaaatgtttaatatattattggattttttattttttttttttgatttagtttatattcgggttgaaaattttaatttatgtttatgatagtggggatttttttaaatgtttatattttttttaataaattgttggaagattttttggttgtttttttaagtgtttggtttattgtaatttttatgtatttattatttattggaatggagtttatttgaggaagaatttgggattatttttttgtttgaaaaaagaggtttgttgtaatgttataggaaattttttaaaagtggatttgtaatagtatattgtagatgtattttgtagtagttggaaaagaaagtgttgtgtgatttgattgaaataaaattaaatgtgttgtttttttaaatttttgaatttttgtattttggtagtttttatttttttatagtttttgtatttgttataatgtagaaatattatgtattttagtgtttttttgttagatatttaggatttgtgttgtaggtagttaaagtgttggtgatataaagattaatattttagatgattgttgagtttagagagtttataggttaggggagataaatatgagataaaaatttgatggaaagtgcgataatagatacgtataatgtattacgatgtgtagtttttagttttaggggggaaaatattttaaaaaaatttgtttttttttaaaaaatttatattttagttttgggaattaatgatttattggtttattgtttagttttgaaacgtattatataggtcggtacggtggtttttatttgtttttaattatagtattttgggagattgaggcgggtagattgtttgagattagtttgggtaatgtggtgaaatttttttttttttttttttttttttttttggagacggagtgttgttttgttgtttagtgtaatttttattttttaggtttaatcgattattttgttttagttttttgattagttgggattataggcgtattttacgtatttagttaattttatttttagtagagttgggtttttattatgttggttaggttggtttcggattttagtttgtttcggttttttaaagagttgggattataggtaggagttattacgttcggtttgcgaaattttattttgataaaaaaatagttgggtgtggtggtatgtttttgtaattttaattattttggaagttgaggtgggaagattatttgagtttgggttattggggatgtagtgagttaagattgtattacgaatttttttgtagataagtgttttaaaagtcgggtacggtggtttacgtttgtaattttagtattttgggaggttgaggcgggaggatcgtttgagattaggagtttaaaattagtttggttaatatggtgaaattttgtttttattaataatttaaaaaaattagttaggcgtggcggtatatgtttgtaattttagttatttaggaggttgaggtaggagaattgtttgaatttaggaggtagaggttgtagttagtttagattgtattattgtattttattttgggttgtaagtgaaattttattttaaaataaaaagacggttttgtttaggttggagtgtagtggtgtaattatattttaagtattatatttggtggattttatttatatattttgtagagatgggtttttatgttttttaagttggtttcgaatttttaggtttaagtgatatgtttgttttggtttttataagtgttagtattaaggtgtgtgttattgtgtgttatttggttataattttaaatattttgtgtttaaatatttgaataggtttttattagtttttattgtttaggtattagattttgtgcgttgtattttatttttaatttaaagtttttgttaagaatattttttggggcgggtaaggtggtttaattttgtaattatattattgaggcgttattgtattttagtttgggcggtagagcgagattgttttaaaaaatgttttgggttgggcgtggtgatttatgtttggttaatatggtaaaatttttttttaaaaaaaaaaaatgattaatttaagattgtgagtgaaattttttaagtttagatgaatgggtatagtatattttttgtttatattgataggttgtgatattggtgttatacggttttttaaatttagttatttttaaggagggtagattgagggtgattgttatagtaatatgaaggtttttttttttattttagttttaagttaattgaaattttttttgtttagtaggaatttttttgagaaatttttgaaaatataattttttatttgtggattatttagtattgtattaaataggaaaagatgtaggttaggtagggaggaggttggtattttgtgaaaaatttaatatttagttgttttgatagtgattaaataaattgataattaagggtgtaatagggaatatagagtaggattttttggtcgaatttagtagtttgtgtaaataagaggataattgaaatggagttttagggtggtagtaggatggagaattttaatagtgaattttaaggatttttgtaaaggtttgttttaatttttatattttgttatttttgagtatttgaattttgaataatatgggtttgaattttttttaggtggattttttttaattaaatgtaggttaaaaatatagtatttgtaaaatgttaaatttatgaatacggagggttttgtttgattttggtatgtttggtggtggaggggttatgaaattatttttttggaatatattaagggataattgtgtttttttgttttttgtttttttgagatagagtttcgttttgtcgttgaggttggagtgtagtggtataatttcggtttattgtaatttttgaatttttaggtttaagtaatttttttgttttagtttttcgagtagttgggattataggcgtgtgttattatgtttagttaatttttatatttttattagagatggggttttattatgttggttaggttgatttgtgggttttatttaaatattgattataattaaatgttgaatgtttatttttgttagtaaaaagcgtcgtatatcgttattaaatattttttttttaatatagtatggtgaaatatattttagaaatattatagtatgagtaatgttttgtaggtggatttggaggtaaagaaataagtttgtgtagtaatttaagtggtaagagatgaagggttaaatttaggtaatggtaatgggatttggaatttaggtatatgtaggtggttaaataaggtttggtgataatttatttaagatattgttaggtttggtcgggtgcggtggtttacgtttgtaattttagtattttgggaggtcgaggcgggtagattatgaggttaggagttggagattagtttggttaatatagtgaaatgttgtttttattaaaaatataaaaattagttgggtatggtggtatgcgtttgtaattttagttattttagaggttgaggtgggaggatttttgagtttgggagatagagattgtagtgagttgagattatgttattgaattttaatttgggtgatagagattttgttttaaaaaataaaataaaaatttttaaataattttatatggttagttattattatattagatagtgtagagtttgatgatattgacgtaattttagtttaatgggttttatggnanaaatagtttttttttatttttaatttttttttttttgagatggagtttttttttgtcgtttaggttggagtgtagtggcgtgattttggtttatagtaatttttattttttaggtttaagtaatttttttattttagttttttgagtagttttttgtaatggtgtaattttaggtttattataatttttattttttgggtttaagttatttttttattttagtttttttagtagttgggattataggtatgtattattacgtttggttaatttttgtatttttggtagagatagggttttattatgttgttttagttggtttnttaatttttggatttatgtaatgtttttatattagtattttaaagtgttgggattataggcgtaagttattatgtttagtttgtaaaattatttttgtttaggttagaaatagatgaggttatagatatgatataataggtttataaatgataaaaggaattttta

SEQ ID NO: 295 - DNA, 4604 bp, Artificial Sequence
  chemically treated genomic DNA (Homo sapiens)
aacggtttaaggtttcggttttttttttttttttttttttttttttggggttttttttttttttttttttatgagatagtttcgtttcgttgtttaggttggagggtagcgatattattttgttttattgtaatttttattttttggttttagttatttttttgttttagttttttgaggaattgggattataggtgtatgttattatatttggttaatttttatatttttagtagagacggggttttattatgttagttaggttggttttgaatttttgattttaagtgatttatttgttttggttttttaaagtgttgggattataagtgtgagttatcgtgtttgatttattttaagttttttagaatttgattttttttacgtttaataaagagtaagtattggtttaataggattaataaggattaattttttaggtgtttttgagttaaaaaaaaaaattggttcgtttgtgtgttattatagttttagttaaaatatttaataaagttttatttagttgtgtttattttaattaattaagtgtgtgattttggttaagttatttaaattttttgagtttttattatttagtggagttataaggtatagtggtttatatttgtaattttagtattttgggaggttgaggtagaagaattgtttgaggttaggagttttagagtagtttggttaatatagagagattttgtttttataaataattaaaaaaaaaattatttaggtatggtggggtgtatttgtataggttttagttattcgggaggttgaggtgggagggttatttgagtttaggagtttaaagttgtagtgagttgagatcgtattattgtattttattttgggtaatagagtgagattttgttttaaaaaattttttaaaagattaaaaatataatttattggggttattaataattaaaaagatttgggttaatattttgttattgttgttatttgtgtttttattttggataagtatgtttttttttttataaattttatttttttttaaagatgggggttttgttatgttgtttaggttggttttgaatttcggggttgaagtgatttttttgttttagttttttaagtagttaggattataggtatgtgttgagtttttgggtaagtaaattaagatttttgagttatatttgtttttttttattaaagagtattgttttagttgttataataaaatattataatttagatggtttaagtaatagaaatttgttatatttttggagtttagaagtttgagattagcgtgttagtatgattgggttttggggagggttttttttttttgcgtttttgttgtgtttttatgtggtggagagagagagaattttttttttttataaggttattaattttattatgggggttttgttttataaattttatttaaatttaattattatttaaaggttttttttaaatattattacgttggggttataatttttaatatatgaatttgggggtgatattatagatattaatgtttattttatagggtttttataaggtttaaggtaggtattaatataggaaagtatttaaagttgggtttggtttgggtaggtagtttaatgatttaataaatattgagtatttatttggagttaagtattgtatgtgttatatgaagcgatattgggaaatgagttatatgtagttaatttttggttttttggaggttttgaattagaaggggatacgtatataatcgtatgtgtgtgtatttatatatataggtgatatgatgtatttgagagaatttagtttaggaattaggaaaatttttaaggagtgatattttagttgtattttgaaggatgaggaatggagaggaggttaattttaggttttaaagtgaatttttgcgtaaaagttatgaggtagtaaggtgtaggggtttttaatgatttaagggaacgtattgtggggttgggattatgatggttagaggaggttttgataagaggttagttaaagagtagagaaaaattttaaggagttttaagaaagggaagtgttacgatgagttttgtgtttggaaatgttttaggcggttatatcgtagtttcgggattggttgggatttggatagatatttggatattagttagaaagttacgataggaaattaggcgaggacgaggtaattggggatgttgtggagtagagacggagagaaaatgggtgtattcgagataagttagggggaaaaaatgtaaggatttggaaatgaatttggggcgcggtaggaaggtatgacgggttgttttgtaggttttatttgtaaattacggcgattagtgaaagatttggaggaggaaggtggatatattttttaataaaaaaaattttttttgaaattttatattaatattttaaaagtaaattagatttttttagatatgtttttgagttgatatttgttaattagttagaattagaaattttttttatttttatttagttataatatacgttatagttgaggtgagaggaaagaaaaggttgtttttttaggaataaagagtggtatttttagtatcgtgggtaaagtttttttaagtttaatagtagttaaaatagcgttttttataaataatatttagttaaaagtttttgggtttgtgattgttttaacggttaagttcggatgagggtttttggagtcgtagttttcgggaaacgtcgattggttttttatttggattttattcgtttaggtagtttagagcggttttaggtcgttcgtttttttgttaattatagtttcgcgattgcgtttagtttttaggtttcgtttttcggttaagcggcgtgtttttattgtacggcgtttgggtttcgcgcgtcgggatttcggttttagtcgttttgttttgtttcgaggtttttaggttcgtttttgggtttcgcgcgttaggatttcggtttcgatcgttttgtttcgtttcgaggtttttaggttcgtttttttgttttcggcgtgttttcgcggtttcgtttttaggattcgcgcgtcgggattttggtaagttttagtcgttcggtttcgttttttcggttttacggttttcgcggttttttttttaagttttatacgtcgggattttggtaagttttagtttttagttttatttttaggtttcgtttattcggttagcggttggttttcgcggtttcgtttttgtgttttgcgagtttttattttgggagtattgcggtcgtcgtgtttcgtttttttttagcgcgcgtacgtttttttgcggttcgtcgttttagacgcgggaagagtttggtcggtttcgagtcgttggtttgtagtttttttgtgtttttcgaggtttttttgttttcgttttgcgaggagttttttattcgaaggcgggacgatgtcgaataatcgatagtcgaggaatcggtagtcgagaaatcgtttcgggaacgagtttcgttttcgttcgttatggaatcggatggtcgcggtgtttgggtttatagtcgcgtcgcgttcgatcgtttggagaagattgttgtttgttcgcgttggtaaagacggagttttttgggggtggttgcgagggtacgcgtcgtatagtttttgggggcggtagaatttttttaaatttttcgtttttttttttcgttttcgcgttgtagtcgggtcggcgtgcggttagtacgtgtcgggggatatagtattaataatttttgttttttatttattttatttttgggcgatttatcggtttttttttgttttgaatttaattgaaacggtagtttttgaattttagcgggttgaagaatcgtttggaggtgtggttaaaaaaatgtttatttcggtcgcgtttttagagtttgaatcgggttggggttggggttgaggtttttgtattttttattcggttttggattatttcgttgtttttcgggagttgtggcgaattgggttgtcgggtcgtttcggagattttttaaattagaagtagttgttattttaagttaaattggtttttttgatatttttttcgtgttagttttttcgagtgagatgggatggagtatcggatatttattatagttgtagattgaagatggtacggaattttttatttttttagtttgtttaaaagattgtatgtttggtgttttcgtttttagtgatgttgtttattgtttttttttatgttgttatattatgggagtttttttagggtttttatttcgtttaaagatatttttatgagtgttattttttgttttttttcgtgtagttttttttagtatataaattaagaaggtttgtaaaatttaagaaaggtttgttttatttttattttttttgaaaagtatttttattgagtatttgttgtgtgtatagttaagtatttttgtatgaagattattggtagtttttttgttatttgtagttgttaaaagtttatattttttttggattttttttttttttgatttttaatttgtagaatttaagttatttagttgtataaagtataagtaatataattttttttttttttttttttttt

SEQ ID NO: 296 - DNA, 4604 bp, Artificial Sequence
  chemically treated genomic DNA (Homo sapiens)
aaaaaaggaaagaaaagaaaaagttgtgttatttatattttatgtaattaggtaatttaagttttgtaagttagaaattaaaggggaaaaaagtttaaaaaggatataaatttttgatagttataaataataaaaaaattgttagtgatttttatatagaaatatttagttgtatatatagtaagtgtttaataaaaatgttttttagaagaaatgaaaatgagataaattttttttgggttttataaatttttttggtttgtatattagaaagagttatacgaaaaaaagtaagaagtaatatttatgaaaatgtttttggacggaatgaaaattttgagaggatttttataatgtgatagtatgaaggaaaataataaatagtattattaagagcggggatattagatatatagttttttgagtaaattaagaaaatgagaaatttcgtgttatttttaatttataattatggtagatattcgatgttttattttattttattcgaaaaagttggtacggagaaaatgttaaaaaggttagtttaatttagagtggtagttgtttttaatttagagggttttcggggcggttcggtagtttaattcgttatagttttcggaaagtagcggggtaatttagggtcgggtaaaaaatgtagaagttttagttttaattttagttcgatttaaattttggaggcgcgatcgggatgaatatttttttagttatatttttagacggttttttagttcgttgaagtttaaaaattatcgttttagttggatttagggtaaggggaggtcggtaagtcgtttaaaaataaagtgaatgagaagtagaagttgttaatattatatttttcggtacgtgttaatcgtacgtcgattcgattgtagcgcgggaacggaaggaggaaacggaagatttgaaaagattttgtcgtttttagaaattgtgcgacgcgtgttttcgtagttatttttaagaagtttcgtttttattaacgcgagtaggtagtagttttttttaggcggtcgagcgcggcgcgattgtgggtttaggtatcgcgattattcggttttatggcgggcgggaacgaggttcgttttcggagcggtttttcggttgtcggtttttcggttgtcgattattcggtatcgtttcgttttcggatgaaaggtttttcgtagagcggaagtaaggaagtttcgggaaatatagggaagttgtaggttagcgattcgaaatcggttaagtttttttcgcgtttgggacggcgggtcgtagaggggcgtgcgcgcgttggggaggggcggggtacggcggtcgtaatgtttttaaaatagggattcgtagggtataggggcggggtcgcgagagttagtcgttggtcgagtgggcgggatttaggggtggggttggaggttgaaatttgttaaagtttcggcgtgtgggatttaggggaggggtcgcgagagtcgtgggatcgagggggcggggtcggacggttgaaatttgttaaagtttcggcgcgcgggttttaggggcggagtcgcgagaatacgtcggggatagaggggcgggtttaggagtttcggggcgggataggacggtcgaaatcgaagttttggcgcgcggggtttaggggcgggtttaggggtttcggggtaggataggacggttgaaatcgaggtttcggcgcgcggggtttaggcgtcgtgtagtgagagtacgtcgtttgatcgaagggcggggtttgaaggttgagcgtagtcgcgaggttgtagttggtaggagagcgggcggtttgaagtcgttttgggttgtttggacggatgaagtttaggtggaaagttagtcgacgtttttcgggagttacgattttagggatttttattcgagtttaatcgttggaataattataaatttagaaatttttagttgagtgttatttataaaaagcgttgttttgattgttgttggatttggaaaagttttgtttacgatattgaaggtattattttttgtttttaagaaagtaattttttttttttttttattttagttgtggcgtatattgtaattgagtaaaaataaggaaagtttttaattttaattagttaataaatattagtttaaaggtatgtttgaaaagatttggtttatttttaaaatattggtataaaattttaaaaagggttttttttgttagagagtgtgtttattttttttttttagattttttattgatcgtcgtaatttatagataagatttatagagtaattcgttatgtttttttgtcgcgttttaagtttatttttaagtttttgtattttttttttttaatttgtttcgaatgtatttatttttttttcgtttttgttttataatatttttagttgtttcgttttcgtttggttttttgtcgtagttttttagttgatatttaagtgtttatttaggttttagttagtttcgagattgcggtgtggtcgtttaaaatatttttaaatataaaatttatcgtggtattttttttttttaaaattttttaaagtttttttttgttttttgattagttttttgttaaaattttttttggttattatggttttaattttatagtgcgtttttttaggttattaaaagtttttgtattttgttgttttatggtttttgcgtaaagatttattttggaatttggaattggttttttttttattttttattttttagaatatagttgaagtattattttttaaaggtttttttagtttttagattggatttttttaggtgtattatattatttgtgtatgtagatatatatatatacgattatgtgcgtgtttttttttagtttaaaatttttaaaaggttagagattggttgtatgtgatttattttttaatatcgttttatgtggtatatgtagtgtttggttttaggtaggtgtttagtgtttgttgaattattgaattatttatttaagttagatttagttttaagtgtttttttatgttaatatttgttttaagttttatagggattttatgaaatgggtattagtatttgtagtgttatttttaaatttatatattaaaagttgtaattttaacgtgatagtatttggaggggatttttgggtggtagttagatttagatggggtttatgaggtagagtttttatgatggggttaatgattttgtaagaagagagagttttttttttttttattatatgaggatatagtaagaacgtaaaagaagagggttttttttaaaatttagttatattggtacgttaattttagatttttagattttagaaatatgataaatttttgttgtttaagttatttagattatagtattttgttataatagttaagatagtgttttttaataagaggaggtaggtgtggtttagagattttaatttatttgtttaagggtttagtatatgtttgtagttttagttatttgggaggttgaggtaggagaattattttagtttcggggtttaaggttagtttaggtaatatagtaagatttttatttttagagaaaagtaagatttgtaaaaagaaaagtatatttgtttaggatggaggtatagataataatagtggtagaatattaatttagatttttttgattattaatggttttagtaaattatatttttggttttttgaggggttttttgggataaggttttattttgttgtttaggatggagtatagtggtacgattttagtttattgtagttttgaatttttgggtttaagtgatttttttattttagtttttcgagtagttgggatttgtgtaggtgtattttattatgtttggataattttttttttaattatttgtagagatagggtttttttatgttggttaggttgttttagaatttttgattttaagtaatttttttgttttagttttttaaaatgttgggattataggtgtgagttattgtgttttgtagttttattaaataatgaaaatttaaggagtttaaatgatttggttaaaattatatatttggttagttagaataagtataattaaataaggttttattaaatgttttaattgaaattatgatagtatataaacgaattaatttttttttttaatttagaggtatttaagaagttagtttttattagttttgttaagttagtgtttattttttgttgagcgtgggagaaattaagttttagaaaatttaaaatgggttaggtacggtggtttatatttgtaattttagtattttgggaggttaaggtaggtggattatttgaggttaggagtttaaggttagtttggttaatatggtgaaatttcgtttttattaaaaatataaaaattagttaggtgtggtggtatgtatttgtaattttagttttttaggaggttgaggtagaaaaatagttggaattaggaggtgaaggttgtagtgaggtaagatggtgtcgttgttttttagtttgggtaacggagcgagattgttttataaaaaaaaaaaaaaaaaaaattttaaaaggaaaagaaagaaaaggaaaaggatcgaaattttaaatcgtt

SEQ ID NO: 297 - DNA, 12968 bp, Artificial Sequence
  chemically treated genomic DNA (Homo sapiens)
ttttttgtgatttagtgttgttattaatatataaggttgatagagtaattttaaatttataatattatatgtagatatttaaaggaaagaaaaagagttttatgtgattttgtttaatgggtttatttatagttgtaaatgtatattgtaagtgatttatatttgggaattattatgtaataattatttttaataataattgatataatttattagaatttgtgagaggtttcgatgtaaataatttatttgtttagtagagagaagggaaggagagtaagtaggggaaaatgtttttaaaatgttttattattggaagtaaatgattataaatgtttttgcgttaagttagggtttggttttaatttttttttgaattttaatgtttttatattttttaaatatattttaaatttttattaaataaattatattttaattatatacggagtttaaaagaggtgattttatgatagatatttagtattagttagtgaaggagaatattggttgaaggtatttaaaattacgtgtataaggaatagtttattttttatttggtgatttattattttaagttatttttgtgttaaagttataaaaatttttagtgttaaaaagtgtaagaagaaatgagttagtaaaaaaaaaaaagtcgggggaaagttaatttttaaatttgtattatttttatttttttattttttgttattttagaatgtatatttggaatgaatttttttagagacgtttacggtatgttaaattttaagttatatttttaaataaagtatatatttttatagatgtgtatatgattttatatttatgtatttttatgtataatttgtgatataatttaattaaataattaaggttgtttttgttgattttaatatatttaaaagtagttttttatattgtaaatgttatattatataaaatattttaatgaaagtttaaatgatatttttagttttatagcgtttattataggtgtattttgatgttattaaatgtttttatataattttttaaaaataaaatagagtttggttttttttatagtttagtttattatttgtgttatagtagtggtaatgtaagatttttatgagagtaaaatgtttattaagtatttttaaattttaaaaagattaattttaaaatgtttttagtttgttatttgtgaggtatataatgggtttatgaagtgaaagtgaaattattatatattaattatagtattttatagaaatatttagatggaggaaggatgtaatggaagaattaagggtttttttttttttttttatagtaattagatttgaaaagtgaagtaattttaaagttattttagaagaaaaaaatgtttaattaaattttaatgtttaaaattggatagtgtgtatggtaggtgatttgtatatatatgttattttttattaaaattgttttttatttttgtgatattaatataaattgtagttatttggttttaaattatagtaagatatattttattttttaaaatgtaaatggttatttaaaatagaaataatttttttagacgtattgtatttttataaatgtgattttggaaatatattgttcgtaaagggtaattttaagagaattgttgagattttaattttatttttatgtatattttggggaggtttttgaaagagtaaaaaggtaaaagatttagttattttttgagattatttatagttttttatttaaagttgtagaagaaaaacgttaatgtattgttattgttttttaatgaaattattttttttttaattaattaagtagtattttttaaatttattgtagaaatgtatattttatttttgttgtgagtcgtttttaattttttttttttttttttttcgtaataaaatttggaaaaatttgttacgtagtattcgtttaacgtatcgtttcgttgtattttttttttttttaattttgtattatgataaaagtaaattttagtattattttagggaaatattgggaatgaatttggtaatgttttttttttttttttttttaggtaaaggaaggggaattttgtattgtcgttaaaatgagcgtttttggtggaaaggaattttttatttcgtatacgttgtggttgtttttgaaagtgtaggtttcgtaaaatgttcggtcgattaaggggtttttttttttcggagtttttgtttttttttatttattttagatttttagtaaggaagggtagaggttggtttgttttttttttttaagagggtatcgcgttgcgtagttaatagtttgcgtcgtttcggggaaatttaaatgtttcgcgattttatcgagttaaggagtaaaagttgtgattgttattagttttttgtcgggttttaaattcggggtttatcggttgaaatttttagttgagtagtttttacgacgttgtttttgacggttaaattcggtgtatgtaaggttgggattaattttttttattcgataaaggaatttgatttttttttgggagatcgtagttcgagttcgattcgtagttttcgtcgcggggtttagggttttaggtaagcggttcgagatttagaggagtttttttggattttttcgaggggtaaattattcgagtttgttattttttttggagttaaaagtttatttttggagtcgttatattttcgtgttttttttcgtatttcgggggtttcgggggatgtacgtgggggtggttttaggagttttgggtgggatttcggggaaatgtattggagattaggcgaaaaggttttttttgtttagaatttgtttttagagcgggtcgcgttcgaattcgtaggtaaaggcgttgcggtttttgcgggcgggcgggcgcgcgcgatgtattttttttagggatagagttagaaagtggacgtttgggcggggggagggggggatttataattggaattaggtttaaaaaaattattttaaaagaaaaatgtagtaagtttttttttcgagattttaggtttattaaaataaaattgaattcgggtgttggtagtgtttagggggagcggaggcggagagggttgaggtcgcgggtcgttcgttttagtttttcggaagttcgggtttttgaagtatagatagttaagagcggttcgagttaagttttaggaataggggtttcgggaagagatttcgatcgggtcgtatagcggggaggtttggttcgagagtttttatttggtcggttgcgattttatattggaatttcggaaacgcgttttggtcgttttagtttaagtgggttttggggcggttttttgttttttattttcgaacgttagtttttttcgggcgattcgaaggttacgaggcgggtcgtatagtttcgcgtcgtcgggggcgtttcgggagtttcggggattgcgcgcggcgtttagggagggcggttgttgttttttggcgttcgttagagttcgcggcgcgtttcgatagtttcgcgtagttcgggttcgttcgggaaaggtttttacgttagttaatttcggtttttttttgcgttcgggttcgcggtaacgttcggggatagtttttgcgcggtagcggttatagtattttagttttgggggagggaggagcgggcgttaggggtttcgtgaggtcggcgagggattttcgcgtcggggagtttaattgaggggtttcgcggggattataaagtagttcgcggtggaacggggtcgggattcggggattgggttgtagtttcggggtggatgagaggtttcgggaggtgtagggttcggtagggagggcgtggagggatttatggtgacgggagtagttttcgttgggagggagtttcgtcgggcggggtcggagttggtagcgtacgtcggatcgggggcggggtttttcgagtttcgcgaaaatgttcgtagtatcgcggggatcggcgtagggggaagcggtcgttcgtacgcgaagtcggggtgggtttcgtatttggggtcgttcgagcgtacgggggcggggagaggagcgggggtcgttttcggggagtcggaggggagacgcggggttcgggtaggttgttcggttgttgcgggtgtcggcgttataaggttcgggagtaagtcgcgtggttgtttttaattttttttttagtcgcgcgtttttggggttttttttgattaggaaatttttcgttggtcgttgacgtacgtagtaagtgagacgcgcggagggatcgagtcgcggttcgggcgtagcggtaaaaaatatttattatagaaatcgatttaagggaagacgttgagagtaaacggtacgcgcggacgtcgttcggttttatgtaaggaattagcgtcgtttcgtcgtagttgttagtcggacggtgtaggagcgcggagtggttttttcgggtttcgcggttaaatcgtattttcgttttggaagcggaggtttggttttgggcggtcgcgtaggatttggggtcgttcgcgggttgtagttcggttcgggagtttcgtggcggttattgcgtttgtttgtagcggttcgcggggtcgggttttttcgggtgcggcgcgtcggtcgggtttttttcgggtcggcggggtttgttttttttttttaggttttcggatcgtggttattcgcggagtcgtataagtttgcgtgtggttgcggaaaggggttcgtacgcgggcggggtttcgggttagtatgtaggtttggatgcggggcgcgggggtggttttcgatttttcgttcgggttgcgtatagtagcgcgcggcgcggcggcgggggcgcgcgggttaattttaggagtcggcggcggcgagtcgcgttttggttgatatcggaaaggtttgtgattggtcgtcggtcgtttttatgtaaacgagttgagggaatggaattttttcggtcgggtttatagtaaaagtacgtttatttttaggtatttttatttatagagttagcgggcgcgggcgggacgggcgtttcgcggtcggatttagttagggtattacgttgttcggttttgcgtcgttaggtattttttttcggggtttttagggacgttagaaggaagttaatttttgttgtttttttttggtttgcgttggatttttttttttttgttgtttttttttgtttttttttttttttttttttgaattaattggttttttggttggatgtttttaattttttttttggttgcgaatttttttttaattgttttttttttataatagggggagaaagtgttttgtggttcgaggcgagtcgtgaagttgcgtgtgcgtggtagtgtgcgtggtaggatgtgcgtgcgtgtgtaattcgagtcgttcgatttgtttcgatttgcgtcgcggagtttttttttaaggttcgttttatttgttgcggttacgcggcgttcgtgggtgttcgtgtttcggagtagttaatcggcgggtgttgggcgacggtggaggagtatcgtttcgttgttgttcgagttagggttgagttatttagttgatgtagatagtggttgtttttcgaagagtgcgtgtttgtatgtgtgtgattttgcggttgtttaatttttaataaattagaggattagttataaatttaattaatatttttaaattcgagtttatagatgtgggagagttgtagaattttgagtgttatcgattgggtttttttatgattgttgttttaagattagttgaagatttttgaaacgttgaattttttgtattgagcgttttgatagaatttattgagagaatagagaatatgataagtatttttagtttagtattgttttaattattgaagttgatttttaaggttatttaaaaaaatttgtagcgtatattaatggatttttgttgtgtttaaattttttatagattgtattgtaaatattttatgaagtagagtatatgtatatatttatatatacgtgtatatatattagtagtattatttttggaagttttagtttttgtttttcgggattgaagttagttttgtatgataaaagtggttttgttacgggagataattgtgttttgttgggattttagataaaatttatttgtaaaaaattgataggtattaattattggaatttttaaataatgtgtttgttgatcgttttatttttcgtataaatattttaggaagtgtatgagaattttgtttttaggaatttttttaatagttaaagatagaatttaatttttgtaagtaagattcgtggaagatagtttttattttttaatgtattaagtaatcggttgttaggagtttattttgggttagaggtcgattcgtagaattagaacgttttttttttttggattgttagtaatttagtttttttttttttttaattattttcgtttttttttatttttcgtagtaataaaggtttttgaacgtgtatgttggtttttcgggagttgtttgttgaagattcgcgtttttgtcgtcgtttggtaggagttgtttgtagggttttaatttaatcggtttgttgtgatgcgtattttcgtagatgttagtacgagtcgtcgttttacgtcgttttttatcgcgttgagtttaggtaagatgagcgaggcgttgtcgttgggcgtttcggacgtcggcgttgttttggtcggtaagttgaggagcggcgatcgtagtatggtggaggtgttggtcgattattcgggcgagttggtgcgtatcgatagttttaattttttttgtttcgtgttgtttacgtattggcgttgtaataagattttgtttatcgtttttaaggtattggttcggagagggtggtgggaggataggcggaggtcggcgaggtcgggggagattcgcgagggtagcggttaggcgggcggggtcggattttggaaaggggttttcgtagtttcgggtcggtttttttagtttgggatgtgggggatgttgtgttgtcgtggcgattttcgggaggtattcgttttagttttttggggcggttttttaggagggttgaaaatattagggtgtttttaaagatatttattgggagtcggtcgggatttttttggtaggggttttagttttgatataaagtaggaaaagttataatttagttcggtagagatagttcgtttgttaatttattgttgtttttatcgttggattaatatttaaattattttgttttttttagatgaaaggattaggaaataaaatagtaagatttttttgtttttaagttagtgaaaagaaattaattagggaaattgttagggattttttttttttttttttaatcgttttataggaattagtatgtttaaagtttatagcgggcgtagttaagtttgtaaaagttttttgaagagttttttgagttttttagtttgtttttgttagaagtcgtaagtatcgaattttgttttttttttcggaatcgttttgaatgttattattagtttatttagattaagttaggggtagcgaaaggtgacgaggttgttttcggagagttaggggttttagcggttcgtttttttgttagaggagggggcggcgcgtagtcggagattttagcgcggcggttttaaagatttttttttattttttatttttgattatttttaaagttttgagttgtttttaaaaattttgatttttaataggggtatgaaaataattttaggcgtttttaaataattattttattatattagtagtaagtagtaggaatttaatttttgtagtggagattttgttttgtttttggtgggtttgaaaagatgcgattaagtaaaattagtgcgggttattttttgttcgtttaaagggcgaattaaggtaggtggttttaagtgtaaagataagttattaaaaaaaaagtttaaataattgttttttttaaagggagattaatttaatataagttttttatagttttaagttttagttgggttttgattttattataacgacgaatatttattttttaaaaaagtattgttgcggttatttttaagttttatatagtttttatatttagattgtgatttttaaaataaaacgaaatttgtagttggttgtgtttatagattggtttttttttttatttatttttttaaaagtagttttttttgtttgttttgttttttagtgggggtggaaatgaggagaaggaacgaaggaacgtggtggtttgtttgattttttttttttttttttcgtttatttagatttgggtttgggagattattttatttttaaattattttaattttttgtttaaatggatttagcgatgattttttagggtattcgtattgagaggggatttaatagggttgggttatggggttattattagataaagagtagaggtaagacgggttgataattattaaaggttattaaaatttggttgttttaatgtattagggttttaagagatttgtggtttttttttgggggggaaattagggttttttttgaatttttttttttgttagggaatttatatttaaatatattaaaagattaaatgattaataaataatttttaggaattggagtaatttagagttttaagttattatatgaaagtatttatttttttttaaaaaatgaaaaattatatatattgtttttatgagttgttagaattttttttagtagaaattataataattatagagttttttttttaaaatgatttttggtaatttatttaaaaataattaatttgttttattgagtgataatttataggttattaaaaatttaaatatagagtttttgaaaaaagtttaagtagattttttgagaatatttaggggaaaggaaaggatagtagagaaattagattatttgattattgtttgttattattttaatttttataaaaagaggtttttttttggaggagatttgtttattgtataattagaagagtagataaaatgtttagtgagatagtaaacgtgaagggataaaatgttagggataaaagtaagtaaaatattaaaatttgtttatatttcgggtttatttagtgtgtgtttttggttttattttatttgtttatttaattattttataagtagttttaatagaaattattattttaaaatttggattttaaataagtcgtaggtaatttttttaggaagttaattagtaaataattattatattttttatggtaaagagaagtaaatgtgaaataatgataaggtttgatgatattgatgaaaagattattgaaggtttttttaggaattttttgaagttttgtaggtaaattttttacgttaattttttgaattaaagagagatttaaaattatgaattttttttaaaatagattataataattttatttgtttattttgagttttaatttgttttttttttatttttttttttttatggaatatttttattttttatagtatgagagatatatgttttttattattaagaaaattttaagtttgttgtgtgttttgttgtatttatagaattagtttaaaaagttgttttgatgatttaggatgtatttggtaatattatggtgttatagtttgtttaggttttggtatattagagtttaaagacgtaaacgtgtttttagtagggaagttcggaggttttggattttgatggtaatattttttttataaaaaggaaataagtaatatttttgtcggtaagattatagtttttagttatgttttaaatattattttagttgaattttgtgttttattttatagttttttttgtaatattggaaggttaacggatttgaagtaaatgaattgtaattgtaattttaatttaattagaattggtttaaaatgttagtttggatcgtgaataggttagttaagaatagtattgggaggtttatgtaatatagaagagagttgatatttggtttaattttttgatattttaaaaatagagaagtaaaataaaatatgagatatttttggttagtaagtttttttttgtttgtttggtttgtgttaaaatgtaaatgtttgtgtttttttatttattgtttatagttttttattttagttgttttttttttttgtttgaagttagatatttttatattttttttatattgtttattagtgataaaatttgtattaaattagtacgtatgttagttttgaattaaaaagaaattttttaaatttggtttaagtatgtttgttaataattggacgatatatagtattaatgaattgttttggatttattagtttttttttatttattcgtttttattaaaaaaaaatttttagagattaatataaggttaagtgaatgatatgtaggtgtttaaatatggttgattttgttgtatttaaaaaaaaagaggagtgggagttaaatttttaatttttttttttttaagttttaatattaatagtttttttttatttagtttttatgataattttattttatgtttgtttcgatttggcgaaggttttttgaatttgttaaattattaatgaggatagtattggaaagatgagagaggtataggtttggagtattgtgaggggaatagtagtaggaggtagataatttagaatatatttttgtagttataaaagaagatttatttatttttatttttttatagatttagatttaataatgagttatttagtttgaaatttacgtagtggaggtagtttttgtatatttgttgaatgttgagttataatagagaagtttgggttattatagggagaggaggatgaggaagtaaaaatatgtgtttaaagagggtattttaatattgtgagttaattttataacgggaagtgaaaattatgaaaaaaaggggaaaatttgttgtgagagattaaaaagagtaaaataaagtaagtttatttttcgggaatagaaaaaaaaaaaaaatagtagtaataattaaataattgattagggagatttattttcgtgatatttttttaaaataaaaagggaattgtcgtattattgtttttaattaaatggtaataaatatatttataatgggaattaaatagttaattagagggtgtttggggaataaatagtagagttttaaaattttttatatggaaaatatgtttaataattggaatgaaaggattaaaaagagagaaaaggtttagattttgtttggtagtgtaagttggataaaatagaggaaaatgtttttttgtttttatgagattagattattttggtgtagttttggggttggaagtatgtttattttttatagtgagttagttcgtgttttgtgttataaggattgaagtagttttaatgaataaaaataatagatagttatttggaggttatagggaaagggtgatggttaagtagattatgaaaatgggaattttgagaaatatgatttcgatattatataagtgagtttatggtagttttttttatatatagaaaaagaggtttgaaaatatatattataaaaaattatgtagtagttattaaggtaaaaattgggaagtaggaggtagaggaaggagtgataatattagattaaggaatgttttattgttattaatttaaaaatagtaattaaaaatgatgatgtaattggaatgagtaatataaatgttattattgattttatcgtaaagaatgttagaaatgattagaataaatatagtttggggtatttcgatttgaagttgtatgattgttttgaaaaatagaaataaaggaaatatagttaatagtaaatgtttagattaagaaaatagtttttagaaggtttaaatgatagttaagaaattgatgttattgtataaagtatttttaggttatgttttttagagtattttattttggaatttatttttttaattatttgagtataaaaatatttatttattagttttttttaatagttttgataagattttatatttatttagttatattaaataaatttttggttaagattagttgggttagtagaaaattttaggtatttgtgaggatatgagtttatatacgttgagatttatagatataaaaatgtaatttaattttatttttgaattgaggggagtgtatagaagtgaatgtttcgtttttttgaggtttgttgattttgtaattagtaaacgaagggtgtatttttgattttttttttttgtgtgttagaatttattgttagtaaaatttaagataatagcgatgagtaggaggtattaaagatgaattgtagagggatagtttaagttatttaagaatcgttagtaagatgaaatttatttttagtagaaattgggtttttttgtgtttttttgttttgttttattttttaaaagtaaagtttgtattttgtttagtttgttagtggaggtttgagtaagtaaaagatgggttggattataaatttataaatataggatgttttgttttttaaacgggagaaattaagaagagatgtttgtatttaggagacggtatagttatttaaaatttttgatattttgttatggttagttttgttttaattgtgttatgtgatttattatggttttatgaggtaaatttagtatatgtgttattatttgaaaatttatatatagttatatataatgtattaggttggtgtaaatgtaattgtagtttttggagttaaaaattgtaaatattgtaattatttttgtattaatttaaaatataataaaaaagtgttttttttttataatttttttgttgttttgtttaagttattattgttatttttttgtaatttaaaaagaaattattgaatatatatttaattttagaataattattatataaatgttttaaaagtgtatgtataatatttttgatgtttgtatttgttttttgattggtgtttagg

SEQ ID NO: 298 - DNA, 12968 bp, Artificial Sequence
  chemically treated genomic DNA (Homo sapiens)
tttaaatattagttaaaggataaatgtagatattagggatgttatatatatatttttagggtatttgtgtagtgattattttaaaattaaatgtatatttaatgatttttttttaggttgtagaggaatagtaatgataatttaagtaaaataatagaaaagttataaagagaagatatttttttattatattttaggttggtgtaaaagtaattgtagtgtttgtaatttttaattttaaaaattgtagttatatttgtattaatttaatatattatgtataattatatgtaaatttttaaatagtgatatatatattaaatttattttataaagttatagtaggttatatagtatagttggaataagattaattatagtaagatattaaggattttgagtagttatgtcgttttttgaatataagtatttttttttaatttttttcgtttgagaaatagaatattttgtgtttgtaagtttataatttaatttattttttatttgtttagatttttattaataggttgaataaggtgtagattttatttttagaaaataaaataaaataaaaaaatataaaaaaatttaatttttgttaaaagtagattttattttgttgacgatttttaagtaatttaaattgtttttttatagtttatttttgatattttttatttatcgttattattttgagttttattagtaatgaattttagtatataagaaaaaaaaattagaaatgtatttttcgtttattaattataaaattaatagattttagaaagacgggatatttatttttatgtattttttttaatttaggggtggaattgggttgtatttttgtatttgtgagttttagcgtgtgtaaatttatgtttttatagatgtttgaggttttttgttagtttagttgattttgattaggaatttatttaatgtaattgagtaagtatgaagttttattagggttattggagaaaattggtagataaatgtttttatatttaggtaattaagaaaatgaattttaaagtaaaatattttgaaaagtatgatttaaagatattttgtataatagtattaattttttggttattatttaggttttttagaaattatttttttggtttagatatttattattggttgtattttttttgtttttattttttaaagtagttatataattttaaatcgaaatgttttaagttgtatttattttgattatttttgatattttttacggtaaagttagtagtgatatttatattatttattttaattatattattatttttggttgttgtttttgaattggtaatagtaaagtattttttaatttagtgttattatttttttttttgttttttattttttaatttttattttaataattgttatataattttttgtagtatatatttttaggtttttttttttatatgtaaaaaaggttgttatagatttatttgtatgatatcgaagttatgttttttaagatttttatttttatgatttgtttagttattattttttttttgtggtttttagatgattatttattgtttttatttattagaattgttttagtttttgtggtatagaatacgaattaatttattatgagagatgaatatatttttaattttaagattatattaggataatttagttttatagaagtagggaggtatttttttttattttatttaatttgtattgttaaataaggtttgggttttttttttttttttaatttttttattttaattgttggatatgttttttatataggagattttaaaattttgttatttattttttaagtattttttaattagttatttagtttttattataagtgtgtttgttgttatttaattaagagtagtgatacgataattttttttttgttttaaaaagatattacggaaataaatttttttgattagttatttggttattgttattgttttttttttttttttattttcgaaaaatgggtttgttttattttgttttttttagttttttataataaattttttttttttttttatgatttttatttttcgttgtaaagttagtttatagtgttgaaatgttttttttgaatatatatttttatttttttatttttttttttttgtggtaatttaggtttttttattgtaatttaatatttagtaggtatatagagattgtttttattacgtgggttttaaattgaataatttattgttgggtttggatttgtaaaaaggtgaaaataaataaatttttttttataattataggaatgtattttgaattatttgttttttattgttgttttttttatagtgttttaagtttgtgttttttttatttttttaatattatttttattggtaatttggtaaatttaggagattttcgttaagtcgaaataaatatagaataaaattattatggaggttaaataagaaaaggttgttgatgttggaatttaagaagaaaaaaattagaagtttaatttttatttttttttttttttaaatgtagtagaattaattatatttgggtatttatatattatttatttggttttgtattgatttttgagggtttttttttggtggaggcgggtgggtaaaggggaattagtaaatttagggtaatttattaatattgtatatcgtttaattgttaataagtatatttaagttaggtttaaaaagtttttttttaatttaaaattaatatgcgtgttaatttgatataggttttgttattgatgggtaatatggagagaatgtaaaaatatttaattttaaatagaaaaaagaaataattggaatgaaaagttataaataataggtaaggaaatataaatatttatattttaatatagattaaataggtaagaagggatttgttggttaaagatattttatattttgttttatttttttgtttttaaagtattaggaagttgggttaaatattaatttttttttatattatatggattttttaatattgtttttggttagtttgtttacggtttaaattggtattttaaattaattttaattaggttgaaattatagttataatttatttattttaaattcgttaattttttagtgttgtaaagaaggttgtggagtggaatatagaatttagttgagatgatatttaaggtatagttagggattgtgattttgtcgataaaaatattatttattttttttttatgaaaagaatattattattagaatttaagattttcgaatttttttgttgaaggtacgtttacgtttttggattttggtgtattagggtttgaataagttataatattatggtattattaaatatattttaagttattaaaatagttttttaggttaattttgtaagtatagtaaaatatatagtaaatttaaggtttttttagtagtaaaaaatatgtattttttatattgtaaaaaataaaggtgttttatgggagggaaggagtagggggagaataggttggggtttaaaataagtaagtagggttattgtaatttattttaaagaaaatttataattttaaatttttttttagtttagaagattgacgtagaggatttatttatagaattttaggagatttttaagaaggtttttagtgatttttttattaatattattaggttttattattgttttatatttgtttttttttattatagggaatataataattatttattggttaattttttagggagattgtttgcggtttatttaagatttaaattttaaagtaataatttttgttgaagttgtttgtgaggtggttgggtgggtagatagagtgaagttagggatatatattaaatgagttcgggatgtaggtaggttttgatgttttgtttgtttttatttttaatattttatttttttacgtttattgttttattgaatattttgtttatttttttagttatgtagtgagtaggttttttttaggaagaagtttttttttatgaggattggggtggtgatagataataattaaatggtttgatttttttgttattttttttttttttttaaatgtttttaggggatttgtttgaattttttttaagagttttgtatttggatttttagtagtttatagattattatttaataaaataaattaattgtttttaagtgaattgttaaaagttattttaaaaaggaaattttatggttattatggtttttgttagaaagaattttgatagtttataaaagtaatatgtataattttttattttttagaagaaaataaatatttttatgtaatggtttgagattttgaattgttttaatttttgaagattatttattaattatttagttttttaatatatttgagtgtgggttttttggtagaggagggagtttagaagagattttgattttttttttaaaaggaagttataaattttttagagttttagtgtattggggtagttaggttttaatggtttttggtggttattagttcgttttgtttttgttttttatttgatagtgattttatggtttaattttgttgggtttttttttaatgcgggtgttttaaagagttatcgttgagtttatttaggtaaagggttagaatgatttaaaagtaaaatggttttttaaatttaaatttaagtaaacggagggagggaaaaaagagttaagtaagttattacgttttttcgttttttttttttatttttatttttattaaaaaataaaataaataaaaaaaattgtttttagaaaagtgagtggaaaaagaggttaatttatagatatagttaattgtaaatttcgttttgttttagaaattataatttaagtgtggaaattgtataaagtttaaaaataatcgtaataatatttttttaaaaagtgaatattcgtcgttgtaataagattaagatttagttgaggtttggaattataaaaagtttatattaaattaatttttttttaaaggggataattatttaaattttttttttagtagtttatttttatatttggaattatttgttttgattcgttttttaaacgaataggaaatgattcgtattgattttatttagtcgtatttttttaaatttattaaagataaaatagaatttttattgtagaaattaaatttttattgtttgttgttagtgtagtagggtgattgtttagaaacgtttggggttgtttttatatttttgttgaaggttaaggtttttaaaggtagtttaaagttttggggatgattaggggtgaaaagtgaagggagatttttggagtcgtcgcgttgaagttttcggttacgcgtcgtttttttttttagtaggaaagcgggtcgttgggatttttggtttttcgaaaatagtttcgttatttttcgttatttttggtttaatttaggtgagttgatgatagtatttagaacggtttcgggaaaagaaataggattcgatatttgcggtttttggtaggagtaggttaaaaagtttagagaattttttagaaaatttttgtaaatttaattacgttcgttgtggattttggatatgttaatttttatagggcggttagagaaggggaaaaaaaatttttgatagtttttttagttagtttttttttattgatttgaaggtagaaaagttttattattttattttttgatttttttatttgaggaagataaaatggtttgggtgttaatttagcggtaggggtagtagtaagttagtagacgggttgtttttgtcgggttgggttataattttttttattttgtattaaagttaaggtttttgttagggaggtttcgatcggtttttagtggatatttttggggatattttgatgtttttagtttttttgggaggtcgttttagaaagttgagacgagtgtttttcgagggtcgttacggtaatatagtattttttatattttaagttaggaagatcgattcggggttgcgggggtttttttttagaattcggtttcgttcgtttggtcgttgttttcgcggatttttttcggtttcgtcggttttcgtttgtttttttattatttttttcgggttagtattttgaaagcgatgggtagggttttgttgtagcgttagtgcgtaggtagtacggagtagaggaagttggggttgtcggtgcgtattagttcgttcgggtggtcggttagtatttttattatgttgcggtcgtcgttttttagtttgtcggttagggtagcgtcggcgttcggggcgtttagcggtaacgtttcgtttattttgtttgggtttagcgcggtggaaggcggcgtgaagcggcggttcgtgttggtatttacggggatacgtattataataagtcgattgagttaggattttgtaaatagtttttattagacggcgataggggcgcggatttttagtaagtagttttcgggagattaatatatacgtttaggggtttttattattgcggggggtgggggggggcgggggtggttaggggaggagggagattaagttattaatagtttaggaggggaaaacgttttggttttgcggatcggtttttgatttaggatgggtttttagtaatcgattgtttagtgtattaaaaagtggagattattttttacgaattttgtttgtagaggttaagttttgtttttggttgttagaaaagtttttgaaggtaaaatttttatatattttttaaaatatttatgcgaagagtaaaacgattagtaaatatattatttggaagttttagtagttaatgtttgttagttttttgtaggtgagttttgtttaaagttttaatagaatataattatttttcgtaataaggttatttttattatgtaaaattggttttagtttcgaaaagtaagagttgagatttttaaaggtagtgttattaatgtatgtgtacgtatatataaatatatatatatgttttattttataaaatatttataatataatttgtggagaatttaaatataatagaaatttattaatgtacgttgtagatttttttaagtagttttgaaaattagttttagtagttggagtagtgttgagttagaagtatttgttatgttttttgtttttttaatgaattttgttaaaacgtttagtgtagaaaatttagcgttttagagatttttagttaattttaaaataataattataagaaggtttagtcgatgatatttagggttttatagtttttttatatttgtgaattcgggtttggggatgttggttaagtttgtggttggttttttggtttgttgggagttgagtagtcgtagagttatatatatgtaaatacgtatttttcggaaggtagttattgtttatattagttgggtgatttagttttgattcgggtagtagcgagacgatatttttttatcgtcgtttagtattcgtcggttagttgtttcgaggtacgaatatttacgagcgtcgcgtaatcgtagtaggtggagcgggttttgagggagggtttcgcggcgtagatcgaaatagatcgggcggttcgggttatatacgtacgtatattttgttacgtatattgttacgtatacgtaattttacggttcgtttcggattatagagtattttttttttttgttgtaaaaggaaaataattggggaaaagttcgtagttaggaaagaagttgaaaatatttagttaagaagttagttaatttaaaaggaagaaaggggaaaaataaaaaaaaataataaaaaaaggaaggtttaacgtaggttaaggagaagtagtagaggttgatttttttttggcgtttttaggagtttcggaaagaagtgtttggcggcgtagggtcgggtagcgtggtgttttggttgggttcggtcgcggggcgttcgtttcgttcgcgttcgttggttttatgaatgagagtgtttggaaatgaacgtgtttttattgtaagttcggtcggaggaattttatttttttagttcgtttgtataggggcggtcggcggttaattataggttttttcggtattagttagggcgcggttcgtcgtcgtcggtttttggaattggttcgcgcgttttcgtcgtcgcgtcgcgcgttattgtacgtagttcgggcggggagtcggaggttattttcgcgtttcgtatttaagtttgtatgttggttcggggtttcgttcgcgtgcggattttttttcgtagttatacgtaggtttgtgcggtttcgcgagtggttacggttcggagatttggaaaaagaaagtaggtttcgtcggttcgaggaggattcggtcggcgcgtcgtattcggagaggttcggtttcgcgagtcgttgtaggtaggcgtagtggtcgttacgaggttttcgaatcgggttgtagttcgcggacggttttagattttgcgcggtcgtttagggttaggttttcgtttttagggcgggggtgcgatttggtcgcggggttcgggggagttatttcgcgtttttgtatcgttcggttggtagttgcggcgaagcggcgttgattttttgtatgaggtcggacggcgttcgcgcgtgtcgtttgtttttagcgtttttttttgggtcggtttttgtaatgggtgttttttatcgttgcgttcgggtcgcggttcgattttttcgcgcgttttatttgttgcgtgcgttagcggttagcgaagagttttttagttaggaaagattttaagaacgcgcggttggaaggaaagttgaaagtagttacgcggtttgttttcgggttttgtagcgtcggtattcgtagtagtcggatagtttgttcgggtttcgcgtttttttttcggtttttcggaagcggttttcgttttttttttcgttttcgtgcgttcgagcggttttaggtgcggaatttatttcggtttcgcgtgcgggcggtcgtttttttttgcgtcggttttcgcggtgttgcgggtattttcgcggagttcggagggtttcgttttcggttcggcgtgcgttgttaatttcgatttcgttcggcggggtttttttttagcggaggttgttttcgttattatgagtttttttacgttttttttgtcgggttttgtatttttcggggttttttatttatttcggggttgtaatttagttttcggatttcggtttcgttttatcgcgggttgttttgtggttttcgcggagttttttaattaagtttttcggcgcgggggtttttcgtcgattttacggggtttttgacgttcgttttttttttttttagggttagggtgttgtggtcgttgtcgcgtagggattgttttcgggcgttgtcgcgggttcggacgtaggagggggtcggggttgattggcgtggaggtttttttcgggcgggttcggattgcgcggagttgtcgggacgcgtcgcgggttttggcggacgttagggggtagtagtcgttttttttggacgtcgcgcgtagttttcggagttttcggaacgttttcgacggcgcggggttgtgcggttcgtttcgtggttttcgggtcgttcgggaagaattagcgttcgaggataaaagataggaagtcgttttagagtttatttgagttggaacggttaaggcgcgttttcgaggttttaatatagagtcgtagtcggttaggtggggattttcggattaggttttttcgttgtgcggttcggtcggggttttttttcgaagtttttgtttttggggtttgattcgggtcgtttttggttatttgtgttttaggagttcgggttttcggggggttaaggcgggcggttcgcggttttaatttttttcgttttcgttttttttgggtattgttagtattcgagtttagttttgttttaatggatttggggtttcggaaagaaaatttattatattttttttttaaaatgatttttttaagtttaattttagttgtaaattttttttttttttcgtttaaacgtttattttttaattttgtttttgagaagagtgtatcgcgcgcgttcgttcgttcgtaggggtcgtagcgtttttgtttgcgggttcggacgcggttcgttttagaggtaagttttgggtaagggaaattttttcgtttggtttttaatgtattttttcgagattttatttagggtttttggggttatttttacgtgtatttttcggaattttcgagatgcgggagggagtacgagggtgtggcggttttaaaagtaggtttttgattttaggggaaatagtagattcgggtgatttgtttttcggaaaggtttagggaggtttttttgggtttcgggtcgtttgtttaaaattttaaatttcgcgacgggggttgcgagtcggattcgggttgcggttttttaggagggagttaagtttttttatcgagtaaggaaagttggttttagttttgtatgtatcgagtttagtcgttagaggtagcgtcgtgggagttgtttagttaggagttttaatcgataaatttcgagtttgaagttcgataaaaagttgatagtaattatagtttttgttttttgattcgatgggatcgcgggatatttgggttttttcggagcggcgtaggttgttaattgcgtagcgcggtgtttttttgaaaagaagaaatagattaatttttgtttttttttattgaggatttaaaatgaatggaaagaggtaggggtttcggggaaagggaattttttagtcggtcgggtattttacggagtttgtatttttaaggatagttatagcgtgtacgaagtgaggaatttttttttattaagagcgtttattttagcgataatatagaatttttttttttttgtttaagggagaaaggaaaggaaatattattaggtttatttttagtgtttttttggagtaatgttagaatttatttttgttataatgtaaaattaaaaaaaaaaaaaatataacgaagcgatacgttgggcggatgttacgtgatagatttttttaaattttgttgcggggagagggagggaggagaattgaaaacggtttataataggaatgaaatgtatatttttgtagtggatttaaaaagtattgtttggttagttggaagaaaaataattttattggaaaatagtaatagtgtattgacgttttttttttataattttaggtaaagaattataggtggttttagaagataattaaattttttatttttttgtttttttaaaagtttttttaaaatatgtataaagatgggattagaattttaataatttttttaaaattattttttgcgagtaatatatttttaaaattatatttgtaaaaatgtagtacgtttaaaagaattatttttattttaaatgattatttatattttaaaaaatagaatgtattttgttatggtttggaattaaatagttgtagtttgtattgatgttatagggatggaaaataattttgatgaagagtaatatgtatgtataaattatttgttatatatattatttagttttgaatattggaatttaattaaatattttttttttttgaagtggttttgagattattttattttttaaatttaattattatgagaggggggaggagagtttttagtttttttattatattttttttttatttgaatgtttttgtgggatgttatggttaatgtgtgatgattttatttttattttataaatttattgtgtattttataagtagtaagttgaggatattttaaaattaatttttttaaaatttaggaatgtttagtaaatattttatttttataaaaattttgtattattattgttataatataggtaataagttgggttgtgagggaagttaagttttgttttgtttttagagagttgtatagaggtatttaatagtattagaatgtatttatggtaaacgttgtagaattgagggtattatttaagtttttattgaaatattttatatggtataatatttataatatggagaattgtttttaagtatattggaattagtagaaatagttttaattatttggttaaattatattataagttatatatagagatatatagatataaaattatatatatatttatgaaggtgtgtattttatttaaaaatataatttggaatttaatatatcgtggacgtttttagaaggatttattttaagtatgtattttgaaataatagaaagtaggaaaataaaagtaatgtaagtttaaaaattaattttttttcgatttttttttttttgttagtttatttttttttatattttttagtattggagatttttatagttttgatataaaaatgatttgaaatagtaaattattaaataagaaataaattgttttttatgtacgtggttttaggtatttttaattaatgtttttttttattagttaatattgaatatttgttatagaattattttttttaagtttcgtgtgtgattaaaatgtgatttatttaatgaagatttaaaatatatttggaaggtgtaggaatattagaatttaagggaaaattaaaattaaattttaatttaacgtaaaaatatttatgattatttatttttaatgataggatattttagaaatatttttttttgtttatttttttttttttttttttgttaggtaggtaaattatttatatcgaaattttttataagttttaatagattatattaattattattagaaataattgttatatgataatttttaaatatggattatttatagtatatatttataattataggtaaatttattaagtaaagttatatgaagtttttttttttttttttgaatatttatatataatgttgtgaatttgaaattattttattagttttgtatattgataatagtattgagttataaagag

SEQ ID NO: 299 - DNA, 7038 bp, Artificial Sequence
  chemically treated genomic DNA (Homo sapiens)
tttagaatttttgttttgtttttttgttgtatttttttttatagtgttgattagaatttaatataatttatattttaattattgattttgtttagtgtttgtttttttttaggagaattttagttttacgagaataggaattgtttgttttgtttatgaatgtgtttttagggttagaattatagtatgtgttaaggaatattcgataaatgtgaaggttgagtattgttttttgttcgttggatattttggtttttttcggcggtttgttgatgttttgtgtgtatttattatatttatggtatcggttttttttgattttagagtaagggcgtttagcggatttttacgtatgtgaatggtttttgtagttttagaatttgttatttgggggtagtatatatttaggtaagttttattatcggttttgagtatttttcgtttttaaaattttggattttagaatttcggagtttggtagtttttggggatttatttttgttagttttatttggtagatggggaaattgaggttttagagaggaggtatgatggggaaaattttaaatattggaattagggaatttggtttttaagtttggtttttgtatttatttataagggtataagggggatttggagggggaagtaggaagttttaatttttttcgggttttagtttttttatttgtttgttttgtggggtgaaagggatatttgattaattttaatgtgtcggggaaggttagtagtgaggggtaatagtaggtttagaattttagatagaatattattattttattttatatattagggattgaggtttagaggggatattagatacggtcggagagttatagtatggaaggtatagggtagtatgaaaggttatttttttgttatttttttgttttacgtttattagagatatttttttatttatgttttgatggtttattttttcgttatatttttttatttgttggttgatttttaagtttttttgtagaatattttttgttaaagtagttacgtggatttttttttggtaaatcgttttagttttttttttttgaaaatgggatagggaaaagttgtagagatggggaggaggaattgtgaaaagtagtttgggggtagaggaggacgtgtgttttaggtaggaaagtgtttgtttttttttcgttttcgtttggtttttgtttattattatgtggttacgtgggtttagtttatagttttaggttttaaaagaggagttggaaatttgaattttgatgtgaaattttttgatttttaaatgttggtaataaatttatttaaatatatatatattaagtaaaacgttatggggttaaattgaatatatttgtggtttcgatttggttattggttgttagtttgagatttttttcggttttaggttttgagggtaggtgattgggagaggtggcgttagggggattttggttttttgtgtttatatagttatttacgtattttgggtttttgggtcgtggtggtttaagtttttattatttttattttttggggaaaggttgaatagtattggggtgggggtgggggagtagtaggcggggtttgttgagtaagagttttgtaaaaataagggtttacgttattttagtttgtagtttttttgtaggatatttgggtcggtatcggggtgggatttgcgttgagaagggatgggttatttttagtagggggtggagggtggggaagggtggtaagtatgttttattttagaggttagagggtttagatttttgttggggttgagtttggtttttgggggttggtttgtaaggttcgagtaatattttaacgtattgtgtgattttaggtttatttttttttgtgttttagtttttttatttagaagatgggatttatattgttaggtttgttatgataaatttaagagggaaagttagattggaaagattttatttttttttatttttttatgtgatttggagtagatatatttagtttttttgggttttagtttttttatttataaagtggagataatgataagattgtggtttggcgtagcggtttatatttgtaattttagtattttgggaggttgaggtaagagggttatttgaggttaggcgttcgagaaaagtttgagtaatagagtgagatatatttatttttataaaatattgaaaaatatgaaaaaagaagaagaaaaaagatttgttttttataaattattagtaggattaaatgagttaatatatgtaaagagtttggaatgtggtttagagaaggtggaagtttggtttaagaatatatagtaaattttttaattagttttagtttttttatatttttttgtatttttttagaatttagaaagggaacgtgggcgagtgttttggtttagagaggggagttattttgtttaaggttatatagtttagttaacgaggaatttttttttttttttagttttttttatttatttatttattatttatcgagtattttttatgtattaggttttgttttaggtattagggatatagtagtgaaggtcgtggggatagatagtaagattggtaggtaagataattttgattataatgagaatggtgacggaaatgaagtaggggtgtgagaggagtgattgagggtttagattttttatgggaaggttagggagggtttttcggaggaggtagtttttgggttgagatttgaggagttgttttgggtagaggtggggtgatagtgtttttggtgtatagggaatagtaaatgtatttttttattggtaaatgttgagcgtgttgtgtttaggagtttttcgtgggttagttttttttaagtggtagtttgtagggagattgaggtagatagttaggataatggtggttggcgatagggaaggaaatttattagtaggtgggatagggagggttttttagaagtcgtggtttttagtttagttttgagtgttttattttgtagtgaggaagggttggtcgggtggttttagggaagttgtcgtatttttttgggttttgatttttttttaatttagaggttgttgggaagatttagaaagttagtaggttgggttagtgttttattttttttttttttgttttttatttattaagggtgtttagagatgttatttttttagtttttgggggcggaggttattttagtttagtagataatattaaaggttgagtaatgttcgtttgttcgttggggttagggttggggttagtgggttggggattagtttcgggtaggttgggagtttttgtttaggtggtttgggttaggagtggtagagaggtgggtttagggagttgttttaatggtttaggaatgggttcgggagggtaaagggttttttaatttgagtttatttagtagaggcgggtaagtggttagaaggttttgggtttgtgtttaagtttaggcgggtcgttgtcgttttttcgtttgtgaaatggtagtagtaaaagtatttttttggtggggtgaaaaaagttgaatttcggggtgtaggtttatcgtaagtatagggtagggatttggtaaaaatttattttttttttttttttttttttttgtatattattttttttcgtgaggtttcgtttaagtttttttttagtaattttagaaatagaagtttttggtttttgggattggtaataggttttagggtttagatgagggtattttatttgggatgaatgggggatatgcggttatgtgattttggtatgttacgttatgttttttttgggtttttattggtataattcgtgggggtttcgttttttttgatgtgtagtttataacgtaagttttaggtttgggagtttggtgggaataatgttattattattgatagtagcgatattttttatggattgtagttgggagaagtgaagtgatttatttaaggttatatagtgtggtagggtcgagtatttttcgtttttgttttattttagggtttaggtcgggtggcgtagcgcggggtaagagaagattcgggcgtgtttaagtttcgagtaggcggtaggtgtggtgggcggggttaggggcggggtttcgtggattagggtttagttttaagcggggcgcgattttgttcggtcgcgtcgattttcggggtttttatattgtttgtggtttaagaggggagtcgttataggcgttaagttttttttttaaagtcggggatttggggaggaggtgggagtttacgggaggaagggttacggagatgggtcgttttttttggagttagagttgcgggttggggtttttagggttcggttcggggagtcgattttggtcggtcgtcggggttttgttcggtttttttgaaattttcgttttttttagtagggggcgggtcggggtcgcgtttcggggggaaggcgattaggtcgttttttttttcgattttttcgttttttaggatagtttttagtttagaggggcggttcgggggcggggtcgtatcgttttttttcgtttttaatttcggggcggtcgggcgggggtgggtagggggcgtgaggtcgtttttgcgtttcgggggtttttcgaaaacgcgtttcgggtgttcggttttttcgttgcgttttgtcgtcgttttttcgggggtttcgggcggtcgcggtcgtgtttttcgcgtttcggcggcgcggcgggaggggtcggcgtgacgtagcggttgttacgggtcgtttttataaataatcgggtttaggagaaattttagcgagttagagtcgcgtacgggattgggaaggggatttattcgagggtttagttattagtttttttattaatagcggttatttcggtagcggcggtagtagtagtagcgacgtagcggcgatagtttagagtagggaggtcgcgttatttgcgggtcggtcggagcgggtagttttaggtttttttttcgggtattcgcgtttatgtaacgtttggtggtttgggatttagtatgtttttttttgtcgtcgtcgtcgtttgtttttaaatttatggaagtggttaatttttattacgaggcggattgtttggttgttgcgtacggcggtaaggcggttttcgcggcgtttttcgcggttagattcgggtcgcgttttttcgtcggcgagttgggtagtatcggcgattacgagcgcgttatcgattttagttcgtatttggagtcgttgggcgcgtcgtaggtttcggcgttcgttacggttacggatattttcgaggcggtttcgttcgcgttcgttttcgcgttcgtttttttcgggtagtattacgatttttttttcgatttttttttcgacgattacgggggtaagaattgtaagaagtcggtcgagtacggttacgtgagtttggggcgtttgggggtcgttaagggcgcgttgtatttcggttgtttcgcgtttttgtatttatcgttttcgtcgtcgtcgtcgttcgtcgagtttaaggcggagtcgggtttcgagttcgcggattgtaagcggaaggaggaggtcggggcgtcgggcggcggcgtaggtatggcggcgggtttttcgtacgcgttgcgcgtttatttcggttattaggcggtgtcgagcggtagtagcgggagtttttttacgtttttttcgtttagttcgttcggtacgtcgagtttcgttgacgttaaggcgttttcgatcgtttgttacgcgggggtcgcgtcggcgttttcgtaggttaagagtaaggttaagaagatcgtggataagtatagcgacgagtataagattcggcgcgagcgtaataatatcgtcgtgcgtaagagtcgcgataaggttaagatgcgtaatttggagacgtagtataaggttttggagtttacggtcgagaacgagcggttgtagaagaaggtggagtagttgtcgcgcgagtttagtattttgcggaatttgtttaagtagttgttcgagtttttgttcgtttttttcggttattgttagcgcggttttcgcgcgcgtttttttgtcggtcggggttgagatttcggggagcgttcgcgttcgcgttttcgttttcgttttcggcggcgtcggtaaaattttggtattggggtatttggtagcgcggggagttcgtcggtaattttaatattttattatatatatatatttatatttttgtttaaattaatcgtatatgtagatggggttttcgttcgtggtgttatttaaagaagaaacgtttatgtgtatagatgaatgataaattttttgtttttttttttgtttttttttaggcgtcggcgggcgggtcggtttcgaagttgatgtaatcggtttaaatatggttgaacgcgtgtgtatacgggattgacgtaatttacgtgtaattgttagtcgggttttgagtaatcgtttaaagatgtttttacgggtttgttgttgttgatgttttgttttgttttgttttttggtttttttttgtattataaaaaataatttatttttatgagaaaagaggcgtttgtatattttgggaatttttttcgttttaagtattaagaatatttttaataaatttttttttgagaatggttataaagttttttgggggtagtaattggtttttgttttttatttttttattttattttggatttgtaggattttgtttttgcgtttttggtgtgtagggggttgtgtgtggggggttgttgttatttttggaggttttggtggttgggtgggggtgttgtagttggtttttttgttttttttgttatttttttttttatatatatagggtttgtttgagatggggttttagtttcgggggaaaggggagaagagtaatgggttaggtatttaggttgatttagagtttttaggcgtcgggacgggtggttgggaattttgtttgagaagagatttcggagtttttggttggtttcgagtgttaggtttgggtttggaagggttgggaggtttgtgatttttgttt

SEQ ID NO: 300 - DNA, 7038 bp, Artificial Sequence
  chemically treated genomic DNA (Homo sapiens)
gggtaggggttatagattttttagtttttttaaatttaagtttgatattcgggattagttagaggtttcggaatttttttttaagtagggtttttagttattcgtttcggcgtttaggggttttgagttagtttgaatgtttgatttattattttttttttttttttttcggggttggaattttattttaagtagattttgtgtgtgtgggagggggagtagtagaggaggtagaaaaattagttgtaatatttttatttaattattaaaatttttaaaaataatagtagttttttatatataattttttatatattagaaacgtaaaaataaaattttataaatttaaaataaagtaaaaaaataaaaaataaaagttaattattgtttttaaaaggttttgtaattatttttaaaaaaaagtttattaaaagtgtttttaatgtttgaaacggaaaagatttttaaaatatatagacgtttttttttttatagaaatagattattttttataatataaaaaaagattaaaaaataaaataaaataaaatattaatagtaataagttcgtaggaatatttttaagcgattatttagggttcggttgatagttatacgtgggttgcgttagtttcgtgtatatacgcgtttagttatgtttaaatcgattgtattaatttcgaaatcggttcgttcgtcggcgtttggagaggggtagagggagaagtagagagtttattatttatttgtatatatagacgttttttttttaaataatattacgggcgggagttttatttgtatgtgcggttggtttggataaaaatatagatatatatatataataaaatattaaaattatcgacgggtttttcgcgttgttaagtgttttagtgttaaagttttgtcggcgtcgtcgggggcgggggcgagggcgcgggcgcgggcgtttttcggagttttagtttcggtcggtagggggacgcgcgcgggggtcgcgttagtagtggtcggaggaggcgagtaggggttcgggtagttgtttgaataagtttcgtagggtgttgagttcgcgcgatagttgttttatttttttttgtagtcgttcgttttcggtcgtgagttttaggattttgtgttgcgtttttaggttgcgtattttggttttgtcgcggtttttgcgtacggcgatgttgttgcgttcgcgtcggattttgtattcgtcgttgtgtttgtttacggtttttttggttttgtttttgatttgcgagggcgtcggcgcggttttcgcgtagtaggcggtcgggggcgttttggcgttagcggggttcggcgtgtcgggcgggttggacgaggaggacgtggagaggttttcgttgttgtcgttcggtatcgtttggtagtcgaggtaagcgcgtagcgcgtacgggaagttcgtcgttatgtttgcgtcgtcgttcggcgtttcggtttttttttttcgtttgtagttcgcgggttcgaagttcggtttcgttttgagttcggcgggcggcggcggcggcgggggcggtgggtgtaggggcgcgaagtagtcggggtgtagcgcgtttttggcggtttttaggcgttttaggtttacgtagtcgtattcggtcggttttttgtagtttttgttttcgtagtcgtcggagaagaggtcggagaggaagtcgtggtgttgttcggaggaggcgggcgcgggggcgggcgcgggcggagtcgtttcgaaggtgttcgtggtcgtggcgggcgtcggggtttgcggcgcgtttagcggttttaggtacgggttgaagtcgatggcgcgttcgtggtcgtcgatgttgtttagttcgtcggcgggggggcgcggttcgggtttggtcgcggggggcgtcgcgggggtcgttttgtcgtcgtacgtagtagttaagtagttcgtttcgtagtagaagttggttatttttatggatttaaaggtaggcggcggcggcggtagggggagatatgttgggttttaggttattaggcgttgtatgaacgcgggtgttcggggagggggtttggggttgttcgtttcggtcggttcgtaggtggcgcggtttttttgttttgagttgtcgtcgttgcgtcgttgttgttgttgtcgtcgttgtcggggtggtcgttattagtgagggggttggtggttggattttcgggtgggttttttttttagtttcgtgcgcggttttgattcgttaaagttttttttgagttcggttatttataagggcggttcgtagtaatcgttgcgttacgtcggtttttttcgtcgcgtcgtcgggacgcgaaggatacggtcgcggtcgttcgagattttcgggaggacggcggtagggcgtagcggagggatcgggtattcggagcgcgttttcggggggttttcgggacgtaggggcggttttacgttttttgtttattttcgttcggtcgtttcgggattgggagcgagagggggcggtgcgatttcgttttcggatcgtttttttgggttggaggttgttttggaaggcgggggaatcggaggagggggcgatttgatcgtttttttttcgagacgcggtttcggttcgttttttgttggaggaggcggaggttttaggagggtcgagtagagtttcgacggtcgattagggtcggtttttcgggtcgaattttggagattttagttcgtagttttagttttaggagaagcgatttattttcgtggttttttttttcgtaaatttttattttttttttaggttttcggttttagaaagaagatttgacgtttgtgacgattttttttttaagttatagataatatgaggatttcgggggtcggcgcgatcgggtaggatcgcgtttcgtttggggttggattttggtttacggagtttcgtttttagtttcgtttattatatttgtcgtttgttcgaggtttggatacgttcgggtttttttttgtttcgcgttgcgttattcgatttgggttttgggatggggtaggggcggggggtgttcggttttgttatattgtgtgattttgggtgagttattttattttttttagttgtaatttatgaagggtgtcgttattgttagtggtggtggtattgtttttattagatttttaaatttaaggtttacgttgtgggttgtatattagagagaacgggatttttacggattgtgttagtggaggtttagagagagtatggcgtggtatattaaggttatatggtcgtatgttttttatttattttaaatgaaatgtttttatttgagttttaagatttattgttagttttagaggttaaaaatttttgtttttgaagttgttagggagggatttaagcgaggttttacgggagggggtggtatgtaggaaagagaaggaaagagaaagataagtttttattaagtttttgttttgtgtttacggtgggtttgtatttcgaggtttaattttttttattttattaggaagatgtttttgttgttgttattttatagacgggaaagcgataacggttcgtttggatttgaatataggtttaaggttttttgattatttgttcgtttttgttgggtaggtttaggttagagggttttttgttttttcggatttatttttaggttattggggtagttttttgggtttatttttttgttatttttagtttaggttatttaggtaggagtttttagtttgttcggggttgatttttagtttattgattttagttttggttttagcgggtaggcgggtattgtttaatttttggtgttatttgttgagttggggtgattttcgtttttaagagttggagaaatgatatttttgggtatttttggtgggtaggaggtagggagggaggggataaaatattggtttagtttgttggttttttgggtttttttagtagtttttgggttggggagggattaaggtttagaggggtgcggtagtttttttagggttattcggttagtttttttttattgtaaaatgggatatttagggttgagttagaggttacggtttttgagaggttttttttgttttatttgttagtgaatttttttttttatcgttagttattattattttagttgtttattttagtttttttgtaggttgttatttggggagggttggtttacgagggatttttgagtatagtacgtttaatatttattagtgaaggaatgtatttgttgttttttgtgtattaagaatattgttattttatttttgtttaaggtagttttttaggttttagtttaaaagttgtttttttcgggaaattttttttgatttttttatgggaagtttaggtttttagttattttttttatatttttgttttattttcgttattatttttattataattagaattattttgtttgttagttttgttgtttgtttttacggtttttattattgtgtttttggtgtttagaatagagtttggtatatagaaggtgttcgatgaatggtgagtgaataaatggaggaggttgagaagaaggagaggtttttcgttagttgggttgtgtgattttaggtaaaatggtttttttttttgaattaaagtattcgtttacgttttttttttggattttgaagagatgtagggagatatgggggaattgaagttaattggaggatttgttgtgtgtttttaggttaaatttttattttttttgaattatattttaagttttttgtatgtattaatttatttaattttattgataatttgtaggaggtaggttttttttttttttttttttttatattttttaatgttttgtagagatggatatgttttattttgttgtttaggtttttttcgaacgtttggttttaagtggtttttttgttttagttttttaaagtgttgagattataggtgtgagtcgttgcgttaggttatagttttattattatttttattttatagatgaggaaattgaggtttagaagagttaagtgtgtttgttttaggttatatgaaaggatgagaaggaataaaatttttttagtttgatttttttttttgggtttgttataataggtttggtaatgtgagttttattttttggatagaagaattgaggtatagagaagggtagatttggggttatatagtgcgttaaggtgttattcggattttgtaggttagtttttaaagattagatttagttttagtaggggtttaggttttttggtttttggggtggaatatgtttgttatttttttttattttttattttttgttggggatgatttatttttttttagcgtaggttttatttcggtgtcgatttaggtgttttgtagggaagttgtaagttaggatgacgtaagtttttgtttttataaggtttttgtttaataggtttcgtttgttgtttttttatttttattttagtattgtttagtttttttttaagaagtggggatggtgggagtttgaattattacggtttagaggtttagagtacgtgagtggttgtgtgggtataggaaattaggatttttttggcgttattttttttagttatttgtttttagaatttagagtcggaaaggattttaaattggtagttagtggttaaatcgagattatagatgtgtttaatttgattttatagcgttttgtttgatgtgtgtgtgtttaagtgaatttattgttaatatttaaaaattaggagattttatattaaaatttaaatttttagttttttttttaaaatttgaagttgtgggttgggtttacgtggttatatggtggtgggtaggagttaggcgggggcggggagggaataggtatttttttatttgggatatacgtttttttttgtttttaaattgttttttataattttttttttttatttttgtagtttttttttattttatttttaagaggagaaaattgaggcgatttgttaaggggagatttacgtggttgttttgatagagagtgttttgtaaaagggtttagaaattagttagtaggtgggaaaatatggcggagaggtgaattattagaatatgaatgggggggtgtttttagtgggcgtggggtagggggatggtagggggatggttttttatgttgttttgtgttttttatgttgtggtttttcggtcgtgtttggtgttttttttgggttttagtttttggtatataaaatgaggtgataatattttatttgggattttgggtttgttgttattttttattgttggtttttttcgatatattagagttaattagatgttttttttattttataaagtaggtagatggggaaattgaggttcgaagaggattagaattttttatttttttttttaaattttttttgtatttttgtgaatgggtataagagttagatttaaaagttagattttttgattttaatgtttgagattttttttattatgttttttttttgaggttttagtttttttatttgttaagtggggttggtagagatagatttttaagggttgttaggtttcgaggttttgagatttaggattttggagacgggaggtgtttaggatcggtagtgaaatttgtttgagtatatattgtttttaggtggtaggttttgggattgtaggagttatttatatgcgtgaagattcgttgggcgtttttgttttgggattaggaaaggtcggtgttatggatgtgatagatgtatatagggtattagtaggtcgtcgagaggaattagagtgtttaacgaatagaaaatagtgtttaatttttatatttatcgaatgttttttggtatatgttgtaattttggttttaaagatatatttatggataagataagtaatttttgttttcgtggagttgaaatttttttgggggaagataagtattaaataagattaatgattaaagtatagattgtattagattttggttagtattatggaggaaaatatagtaggggagtagagtaggagttttggg

SEQ ID NO: 301 - DNA, 8961 bp, Artificial Sequence
  chemically treated genomic DNA (Homo sapiens)
  unsure (3866)
taacgagggaaattggaagttttgtagaacgggggagaatggttcgtttgttataatgagtgtagtaagagggtgggttagggagttgaagggaaggttggaaaaagaaaatatttattttaaaggtgatagggagtttttgataggatttgatgtttttgatgttaaaaattttagttttaagatgaggagagttaaatgtggaatgttagtgggtttatagagttagttaggagttagcggaagatttgtttgtatttttggtgttttgtttaggagtagggggattgtaattttttgaggtaagtttttgttttttttgaatttatttttttgtattagttttttagttttttggattttagagaaggggagagttatttggttaggtttttttttaggaaaatgagatgagaagggtaatgtagagatggtatgaggtttattttatttattattggttagtaaagggttttttttataaggaagtttaagtttttttttaattcgttttatttttataggttttggatttatgtaaaaaaggtatatgagtagagggagatattatttttggtttggggttagggtagtaaggtagtggtgttgggatattggtttttatttaggttttgaatttttgggagttaggaaaagggaaaagtgataggttgatgggttaggttttttgagggttaaagggttttaagattgggtttttttttggttaggcgtagtggtttacgtttgtaattttagtattttgggaggtcgaggcgggcggattatttgagtttgggcgttcgagattagtttgattaatatggagaaatttcgtttttattaaaaatataaaattagtcgggtatggtggtatatgtttgtaattttagttattcgggaggttgaggtaggaaaattatttgaatttgggaggttgaggttgtagtgagtcgagatcgcgttatggtattttagtttgggtaataagagcgaaatttcgttttaaaaaaaaaaaaaaaaaaaaaaattaggtttttttttgaggtgggaagattatttgagtttagaagtttaagattagtttggtaatatagtgaaatttcgtttttataataaatttaaaaattagttgggtgtggtggtgtatgttcgtggttttagttataggtgggaggttgaggtgggatgattatttgagtttaggaggttgaggttgtagtgagttgtgattgcgttattgagattttgttttttaaaaaaataaaaaataaaataaaaaaaattcggttattttagtttttaggattgggtttatagggtggttggagggtatgtataataagggaaggagatggtatacgttggagggttattttggggtataatttaatgtagaaggttttttggattgttgatttttttttttttttttttttttttgaggtagagttttgttttgttgtttaggttgtagtgtagtggtgtaattttagttttttgtaatttttattttttgggtttaagtaatttttttgttttagtttttgagtagttaggattataggtacgtgttattatgttaggttaatttttgtatgtttagtagagacggggttttattattttggttaggttggttttgaatttttgattttgtgatttatttgttttggttttttaaagtgttgggattataggtatgagttattatgtttcgttggaatattgatttttatataggtaggggaagatggggaatattatataattaaagatttttttttttttgaggtggagaatgtggttttaataagatgaggatggaggttattggagatattatgagattttaggatataaaatgggaaagtgtttgaaaaatatgggatattgaggataagtaggatttggtgtttaagaatgagggaaataatgttggtatattgtggagttttttaagaaggaaggatatgaatatattataggattttagtattaggaatgttggatggatgaatattgttttttaagaaaaattttttagtaagtagggaatagataggagattatgttgattatggtttatatttataaattttttaagtattattttttagtttttagaaggattacgataaattttattgggatatgtttttttttggaattagtgggattttattttttgtaataggaaattgggaaatagtgtttagtagtttttttttggtattattttgtcgtgtattatagtttgtttggttgtttatgttttttgaagggaggttttttggttttttttgattttttatggtgcggagttcggttttgttaggtattttgttaatataggttgaatgaatatgagtagtggtgagtagcgggagggtaggtttttatttttggtgtgtatagagtaggaatttgagtttatatcgtgatgggatgtttatttttaggaatggtttgggggtgttggtgaaagatttttgatttggggatgtggtgagggggaggattgttagaatgttgagagatagtttttggatgggagttggtaattattatgggatgttgtagggtgaattagattttatgtaaatgttttatttgttagtttggtattttggttggttggtgttttttaaaatttaggagttggaggtaagtatttggaaaatatttagattttggtgggattgggtggggttttaggtgggtttttagttttcgagtgtttggaaatgatggtatgagggaagttggggttttagatattaggaggttttttgttaggatattattttggtttagaaagggattaaggtgtgtgtaagtgggggcggggataaggaagcgtgggtagtttgtttggttttttttgttttgggtgttagaatagattgatagcgtttggagatgggggtgggaagaatatgaatattatgggatgtttggttcgaagggtataggggtggtagagtggagatgaagtattatgggatgtgatattgggttgtgttgggagtattatggtatgtttggttgattacgggttttttgtaattattatgggatgttaggatgtgggtaggagagtaaaattattatgggatagttttttagtgttagaggaaaagagattagatgtttatttgtggggcgatagtagggttgttgattattatgggttatttttttgatagaggaggggtatttattataggttgtggagttagaagagggaaggttgggggtgatgtgagtttttagattttggtttgtagggattgagggtagttttagggggttagttattatgggatgttagtatagaaagtgggagattgattattacgggatgtgtgtgggaggaggtcgagtgttcgttgttgtagtatgggggggggtgagtttttgattattatgggatattaaattgggggtggatgaaggatggttattatgggatgtttgtgggggatggggttgaatattatgggatatgaggtataagtgttgcgaggggtgtttattatgggatggttatggggagggaggggtgatgaattattatgggatgttagtattaggtttaagagtgaagaagaagttggtaaaggatgtttattatgggatgtttaagagggttagttgtaaaaggtttgtaatattttgagatgttagtagtttttggtatatgtgtatgaaatgtgggggggtagggtgtgtgtgtgttgtgtgtgtgtgtgtgtgtgtgtgtgtgtgtgtgtgtgtgtgtgttgggggggggggtgttcgtgtgtattatgggatggttaggaggtgggcggttgtttaggtgacgcgcgcgcgttcgtttngaagggggcgtggttagtggttgtttgagcgacgagggggcgggggttgttcgggagatttggggaggagggtggcggtagtggaaggggggggttggagttggttgaggttattatgggttgttcgtgggggggcggggtttgtgcggtgggatttttcggtcggtgttttaggttttttaagaggcgacgttggagtcggagttattttttttttttcggtcgcggcgaggaggagtcggagcgggagtgatatcgagtcggatttagcgcgatttgcggcggtttcggggtgaggagagcgcggggtttttaaagagacgttttttacggttttattagtttcgagggttatttcgttattcgttttttttttaggcgttttcggattcgcggatcgttttttgtttagaggagtcgatttttttttttttggttttgtagggcgttcggttttttttttagttttcgttttaattttgtcggagttttgtttttcgcgatttttcgttttcggtttggttttttataatgttcggcgtttattttttcgttttttgattatttgtttttcgggatacgtggttcggtttttttttcggtgggacgttttcgtttttcgcgtttttgttttcggtttttcgtagcgttcgagtttttacgttttttcgttttcgtagtttttgaggagaatttgagttgttttagaggatagtttttggagagttgttttgtttggggattggttttttttcgggcgtagggaggcgtttttttatttttaagtgattttgtgttttcgagcgtttcgtcgtttgcggttttttttggttttttcgcgtcgttgttattcggattttttttttcgttatatttcgttcggtttagtttcgcgtttttttttttcgcgtttgtattagtttgttttcggaggcgtcgttttttcgtttcgtgggggcgtttgtcggggagtcggttttcgggttgttttcgaggagtgtggaattaagtttagtttgagcggttcgggtgttttgttagggtggttggggtggggggcggaaagagcgggtgggtgtgggggagggggatagtgcgcgttattgattgttttgtgttttttttttttttttcgtatagtgattcgggttagtgtagaggtttttaggtcgtcggtaggagtagttgggttaattttttggtcgggagcggaaggggatggcgtcgggtttgggtttttcgtttttttgttcggcgggtagtgaggaggaggatatggatgtatttttgaataatagtttgtttttattttatttaggtaatattttttttaagggtttatggcgggaaggagatatttggggttttttcgagtgatttttttggtgaggtagggttgtgttgtttcgttgtttttgtgtagagtcggaggtggagggtattcgaagggagtggtttttttttgcggagttttggtgtgaggggggtggaagttatgtgttttttgggtacggagatgttagtttgttgtattttgttttgaggaatgttttgtagtttttagttgagggagttttttgggttggtaggtattatttggtatgtgggttttcggaggaatgtaggtagttgggatttttggaggtttgtggtggtggtggtggaggggggcgttgaggattttgtttgaaagattagtcgggtatttgtgttagtaggattttgtggttgttgttgtggaaaggaaagagggagtgttggttatattttatttgattatttttagtttttgatcggttatcggttttttgtgttgtttgaattgtgtgaagtttgaatcgcgttttttagtaggatttggagtgtttaaagtagttaggtagattgttggaatgttttgagtggggaagtgatgggggttcggggaggatgtaatagtttagtgaagaggggtaaaagaagggagggtatttttttttttggtgagtggatatagttttggttttttttttagtggtttttgtttttatgaggtagtttgcggtttaggttggtagtgtgaagtgtttgtgtaggtgtgttaggggttacgttatttgtgttttggggtggttttatgaattggttaaattcgtatggttgtaattattttgtttgattgggggaattgttgtttatttttaaatgatggttgatgttatgtttttaagtagatgttttttttttttgtgtttttttttagagtttttagttgtgttatttatttatttttttgatttttatgttttttagtttaatttttttttttatatgttatttttttattttttttgtttttagttttttttttattttggagtttgttgattttgtttttgttttttatttagtattatttatttttgttttttttttttttagttttagtggaagttgaggtggtttgggagagatgtttttatatttggtattttttaagttggaattttttattttaatttgaggttatttaggagaggggttagtgttgttatggagtttgggttgttgggatgagaaatttggttttatttttgtgtagagtagggggtagatttttatgtttttgtttaaggtgagggcggagttgtggtgttggtaaggggattttgtttttttgagaggggtatgagaaatagtagtgttgtttaaatattttgggttttacgttttggttttttattggttatttgggttggggttgttttttatgttgatcgggagttgcgtaggagttgtgaattttgttttgagttgtagtatgatttattttttttatttgttatattttatttttgttttttttttaaattttttttatattttagtaagtttgcggtttgttattttagtatattatttgtttgagaagtttggggggttttatgtgtatggaaggatgttttttttgtttttatgggttgtttttgtttttatttttagtttttatgggggtggtgagatgtagttgatgggggttgggggttgatttggggattggtggggaaaagtttttaagaaaatgattttttttggtgaaatttaggttgatgttgtatttttaagggggaatgggaggggcgtttttgtgtttggttttattttgggttgagaagtagggaggttgatggtgttttgtttagtttaatgttttattttttagtatttgtttagtttaggaagtggggagttagagatattttagggttaattttgggggttaagagttaagaatatgttagggattgaaggagggatattatttttttttttatttttgagatggggttttattttgtcgttaaggttggagtgtagtgtgcgattttggtttattgtaattttcgtttttcgggtttaagcgatttttttgttttagttttttgagtagttgggattataggtatttattattatgtttggttaatttttgtttttttagtagagatagggttttattatgttggttaagttggtttcgaattgattttaaatgatttgttcgttttagttttttagagtgttgcgattataggtatgagttattgtattcgattgggatatttttttttattattgtttaggttttgttttgtttttttgtgtagatatttttatatgttggataggaatttgggtgggagtggtgaggaagttgagttttagagattttttgtgggtttttattttttaaattaaattttttgggtattagaaatttggggagaaggttgtatgcgttgattataagtttattgagtttttgttaaattttagttttgatgattgaaaaaataattatgattgagggagtgatcgagttttttttttagtattatttttatgtttgtttcgttttttttgggtttttttgtttaggatgttagggtgggtttttgtgaattgttgttattttagagtaggtggtatttggatttggggttaggtaatttggggaggtttttatgagggtagttttttttttcgttattttattttttttaaatttatttttttttttgttattttttgtttgttttatgttggtagttgggtgttttgggttggtttttgcggttaggagttattttttttttttttagtgggtgaggtattttttttttttttttatttttttttttatttatttttttttgggcgggggtggtttgggaagagggagagaggagggaggagggagtcggagttagtgtgaatgtttgttataaaggaagttgttttttggttttttttgtgtttttttttatttatttttgtttaggagtttttagttttatttaggttttgtgtgtgtttttagttaggggaggaggtggagttagatgggaggaggtttgttggggggcgggtgtaggggagatggtgatagttgggttgattcgggtttttagggagaagaggttgttgatttaggagaagttgaggaggaatattagggttggagatggggaaaggaaattgtattttagaagtgggtatgagattgagttggtatttgaatttaggatttggaggttttggttaatttgagtagtgatgattttaaagtggttagagaagggtgtggttttcgagatttttgaattgattttgttttgggaaggtatattttatagtttttgttttttgagtaggattttttatttttattttttggtttatagaataatttggtggttagttataggaggtttaaatttagtttttttatttggtgaattttgagtagtttagtttagttgtattggtgaatatttagaggattggtaggaacgggagagaggaggtaggggtttggatagttgttcgaggtgggtttggtttggtttggtaggtttatttcgggtatatatagttttttttttgtttgtttttgttttgggtattagtttttttttgtatagagtatagtagttttttttagaggaatttgggataagaggtggggaataaagtttaaagtttttggattagggtttaattttttgttattgattttttttttgtttattattttttgttaaatatatgtaga

SEQ ID NO: 302 - DNA, 8961 bp, Artificial Sequence
  chemically treated genomic DNA (Homo sapiens)
  unsure (5096)
tttatatatatttggtaaagagtggtaggtagggaaaagattaatagtaaaaggttaggttttaatttagaggttttagattttattttttattttttgttttagatttttttgaagagaattgttatattttgtataggaggaagttgatatttaggataaaaatagataaagagagagttgtatatattcgaaataggtttgttaggttagattaggtttatttcgggtagttgtttagatttttgttttttttttttcgtttttattagttttttagatgtttattagtatagttgaattgagttgtttagagtttattaagtaagagaattagatttaggttttttgtaattggttattaagttattttataaattagggaatgagaatgaaagattttatttagaaggtaaaaattatagaatatatttttttagaataggattagtttaggggtttcggaaattatatttttttttaattattttgaagttattattgtttaaattaattagaatttttaagttttaggtttaggtgttagtttaattttatgtttatttttaaaatataattttttttttttatttttaattttaatgtttttttttagttttttttgggttagtagttttttttttttaggggttcgaattagtttagttgttattattttttttatattcgttttttagtaagtttttttttatttggttttatttttttttttggttggaggtatatataaagtttgggtaagattgaaagtttttgggtaaggataggtgggaagggatatagagaagattaggaggtagttttttttgtaatagatatttatattggtttcgattttttttttttttttttttttttttttttaagttattttcgtttaaaggggggtgggtagagaaaggagtggagagaagaagggagtgttttatttattgaggagagggaaaatggtttttgatcgtagaagttagtttagggtatttagttgttaatataggatagataggaagtggtaggggagggggtgggtttgagagaggtggggtggcggggggggagattgtttttatagaagtttttttaaattatttggttttaggtttaaatgttatttattttgggatgataatagtttataagagtttattttaatattttaagtaaggaaatttaaggaaagcgagataaatatgaaggtaatattaagagaagaattcgattatttttttaattataattatttttttaattattagagttgagatttaataaaggtttagtggatttgtggttagcgtatataattttttttttaaatttttgatatttaaaagatttagtttgaggaatggaggtttataagaagtttttgaagtttagtttttttattatttttatttagatttttatttaatatatgggaatgtttgtataaaaaaatagagtaggatttagatagtggtagaagagaatattttaatcgggtgtaatggtttatgtttgtaatcgtagtattttgggaggttgaggcgggtagattatttgaggttagttcgaaattagtttggttaatatggtgaaattttgtttttattaaaaaaataaaaattagttaggtatggtggtgggtgtttgtaattttagttatttaggaggttgaggtaggagaatcgtttgagttcgggaggcggaggttgtagtgagttaagatcgtatattgtattttaattttggcgatagagtgagattttattttaaaaataaaaaagaaaataatattttttttttaatttttgatatgtttttagtttttaatttttaaaattagttttaaaatgtttttggttttttattttttgagttagatagatattagggaatgagatattaggttggataaagtattattagtttttttgttttttagtttagaataagattaggtataagaacgttttttttatttttttttgggaatgtaatattagtttggattttattagaaagaattatttttttaaggatttttttttattaatttttaagttaatttttaatttttattagttatattttattatttttataaaagttggaagtggagataaagataatttatggaggtaaaggggatatttttttatgtatatggagttttttaaattttttaggtaaataatatgttgaaatggtaaatcgtaaatttattgagatatagagaagatttaggaaagggataggaatggggtgtggtaagtggaaaaagtgggttatgttatagtttaggatagagtttatagtttttgcgtagttttcggttaatatgaaaggtagttttagtttaagtggttaatgggaggttaagacgtggaatttagaatgtttaggtagtattattgttttttatgttttttttagaaggatagggtttttttattagtattataatttcgtttttattttgggtaagggtatggaaatttgttttttattttatataaggatgaaattaagttttttattttaatagtttagattttatgataatattaattttttttttaaatggttttaggttgaagtgaagaattttaatttaaaaagtgttaaatgtgaaagtattttttttagattattttaatttttattgaagttaagaagagagaaggtagaagtgaatgatgttggatgagaaataaaaataggattagtaggttttagaatgagaagaaaattagaagtagaaggaatgaagaaatgatatgtagaaaaaaaaattaaattagaaaatatgaaggttaaggagatgagtaggtgatatagttaggggttttgaaaaaggatatagaagagaaagatatttgtttaggggtatgatattaattattatttgaggatagataatagtttttttaattagatagggtggttataattatacgggtttggttagtttatgaagttattttaaaatatagatagcgtaatttttagtatatttatatagatattttatattgttagtttaaatcgtaggttattttatagagatagaagttattaggaaaaaagttaaaattatgtttatttattaggaggaggagtgttttttttttttttgtttttttttattaggttattatatttttttcgagtttttattatttttttatttaaaatattttagtaatttgtttggttgttttaagtattttagattttgttgaggagcgcgatttaaattttatatagtttagatagtatagaaaatcggtaatcgattagaagttaaaaataattagatagagtgtaattagtatttttttttttttttttatagtagtaattataggattttattagtatagatgttcggttggttttttaaatagaatttttaacgtttttttttattattattattataagtttttaggggttttagttatttgtattttttcgaggatttatatattaggtaatgtttgttagtttagagagtttttttaattgggaattgtagagtattttttaagatagagtgtagtaagttggtattttcgtgtttaggaggtatatggtttttattttttttatattagagtttcgtagaagggaattatttttttcggatattttttattttcggttttgtatagagatagcggagtaatatagttttgttttattagaggagttattcgggagagttttagatgtttttttttcgttatgggtttttggggaagatgttatttgggtggggtgggggtaggttgttgtttaaaagtgtatttatatttttttttttattgttcgtcgagtagggggacggggagtttaggttcgacgttattttttttcgttttcggttagggaattggtttagttgtttttgtcggcggtttgaggatttttatattggttcgagttattgtgcgggggaggggggagaaatatagaatagttagtgacgcgtattgttttttttttttatatttattcgtttttttcgttttttattttagttattttagtagggtattcgaatcgtttaggttgaatttagttttatatttttcgggggtagttcggaagtcggtttttcggtaggcgtttttacggagcgagggagcgacgttttcgagggtaggttggtgtaagcgcggggaggggagacgcggggttggatcgagcggggtgtgacgggggagggggttcgagtggtagcggcgcgggggggttaggggaggtcgtaggcggcgaggcgttcggggatataaggttatttgggggtgggggggcgtttttttgcgttcggggaggggttagtttttagatagggtagttttttaaaggttgttttttgggataatttaggttttttttaagagttgcggggacgagggggcgtggaggttcgggcgttgcggggggtcggaggtagggacgcggggggcgaaagcgttttatcgggaagggggtcgggttacgtgtttcggggggtaagtgattaaagggcgagggggtgggcgtcgggtattgtgggagattaagtcggaggcggggggtcgcggggagtaagatttcggtagggttagggcgggggttggggaggaggtcgggcgttttgtagggttaggaaaggaagggtcggtttttttgggtaaggggcggttcgcgggttcggagacgtttgaggaaggggcgggtgacgggatgattttcggggttggtagggtcgtgaggggcgtttttttgggaatttcgcgttttttttatttcggagtcgtcgtaggtcgcgttgggttcggttcggtgttattttcgtttcggttttttttcgtcgcggtcgaaggggggaaaatggtttcggttttagcgtcgttttttaaagggtttgaaatatcggtcgggaaattttatcgtataggtttcgtttttttacggatagtttataataattttaattaattttaattttttttttttattatcgttatttttttttttaggtttttcgggtaattttcgttttttcgtcgtttaggtaattattggttacgttttttttngagcgggcgcgcgcgcgttatttgggtaatcgtttattttttggttattttataatatatacggatatttttttttttaatatatatatatatatatatatatatatatatatatatatatataatatatatatattttgtttttttatattttatatatatatgttagagattgttgatattttaaaatattgtagattttttgtaattaatttttttagatattttataatagatattttttgttaattttttttttatttttggatttaatgttaatattttataataatttattatttttttttttttatggttattttataataagtatttttcgtagtatttatgttttatattttataatatttagttttattttttatagatattttataataattattttttatttatttttagtttgatattttataatagttagaaatttatttttttttatattataataacggatattcggtttttttttatatatatttcgtaataattagttttttattttttatattgatattttataataattaattttttagagttgtttttagtttttgtaggttagggtttagaggtttatattatttttagtttttttttttttagttttatagtttatagtaagtattttttttttattaaaaagataatttataatgattaatagttttattgtcgttttatagatggatatttaatttttttttttttaatattggaaagttattttataataattttatttttttatttatattttgatattttataataattgtaaggagttcgtggttaattaaatatattataatatttttaatataatttagtgttatattttataatgttttatttttattttattatttttatatttttcgagttaggtattttataatatttatattttttttatttttatttttaggcgttgttagtttattttaatatttagagtagggagggttaggtaggttatttacgtttttttgttttcgtttttatttgtatatattttaatttttttttgggttaaagtagtattttggtaaaaagttttttgatgtttgggattttagttttttttatattattatttttagatattcgggggttgggagtttatttagggttttatttagttttattaaaatttaggtattttttagatgtttatttttagtttttaagttttgaggaatattaattaattaaaatattaagttgatagatgaaatatttatatgaagtttaatttattttatagtattttataataattattaatttttatttaaagattattttttaatattttagtaatttttttttttattatatttttaggttagggattttttattaatatttttaggttatttttggggatggatattttattacgatgtgaatttaggtttttgttttatatatattaagagtgaaggtttgttttttcgttatttattattatttatgtttatttaatttgtgttgatagagtatttagtaaggtcgagtttcgtattatggagaattaaggaagattagggggtttttttttaaaaagtataagtaattaagtaaattatgatatacgatagaatggtgttaagggagaattgttgagtattgttttttaattttttgttatagaaaataaaattttattggttttaagagagaatatattttaataagatttatcgtggtttttttagaggttggaagatgatatttaaaggatttatgggtatagattatagttaatatgattttttatttgttttttatttattaggggattttttttggaaagtaatgtttatttatttagtatttttaatattgaaattttataatatgtttatgttttttttttttaagagattttataatatattagtattgttttttttatttttgaatattaaattttgtttatttttaatgttttatattttttaggtatttttttattttatattttgaagttttatagtatttttaatggtttttatttttattttgttggggttatattttttattttaaaaaaaaaaaaatttttagttgtataatgttttttatttttttttgtttgtatagaagttaatattttagcggggtatggtggtttatgtttgtaattttagtattttgggaggttaaggtaggtggattataaggttaggagtttaagattagtttggttaaaatggtgaaatttcgtttttattaaatatataaaaattagtttgatatggtggtacgtgtttgtaattttagttatttaagggttgaggtaggagaattgtttgaatttaggaggtagaggttgtagggagttgagattgtattattgtattatagtttgggtaatagagtaagattttgttttagaaaaaaaaaaaaaaaaaaagaagttagtagtttaggaaattttttatattgaattatgttttaaggtagttttttagcgtatattattttttttttttattatgtatattttttagttattttatggatttaattttagaagttgaaataatcgaattttttttgttttgttttttgtttttttgagagatagggttttagtggcgtaattatagtttattgtaattttaattttttgggtttaagtgattattttattttagttttttatttgtagttggaattacgggtatatattattatatttagttaatttttaaatttattgtagagacggggttttattatgttgttaggttgattttgaatttttggatttaagtgatttttttattttaggaaagagtttaatttttttttttttttttttttttgagacggagtttcgtttttgttgtttaggttggagtgttatggcgcgatttcggtttattgtaattttagttttttaggtttaagtgatttttttgttttagtttttcgggtagttgggattataggtatgtgttattatgttcggttaattttgtatttttagtagagacggggtttttttatattggttaggttggtttcgaacgtttaaatttaggtgattcgttcgtttcggttttttaaagtgttgggattataggcgtgagttattgcgtttggttaggaaagagtttaattttaaaattttttggtttttagaaaatttaatttattagtttgttatttttttttttttttgatttttagagatttaggatttgagtgaaaattaatgttttagtattattgttttgttgttttaattttaggttaaggataatgtttttttttgtttatgtattttttttgtatgggtttaagatttatggaagtgggacgagttgaaaagaaatttggatttttttgtagaaagggttttttattaattagtagtgagtgggatgaattttatgttatttttgtattattttttttattttatttttttagaggaaggtttggttagatggttttttttttttttaggatttaagggattggagaattggtataaagaaatgagtttagggaaggtaagagtttgttttagggaattataatttttttgtttttgagtagagtattagggatgtagataagtttttcgttagtttttggttgattttgtagatttattagtattttatatttaattttttttattttaggattggagtttttggtattaaagatattaggttttgttaaaagttttttgttatttttgaagtaggtgttttttttttttaattttttttttagttttttggtttatttttttgttgtatttattgtggtaagcgggttattttttttcgttttgtaaggtttttagtttttttcgtta

SEQ ID NO: 303 - DNA, 17142 bp, Artificial Sequence
  chemically treated genomic DNA (Homo sapiens)
aaatatatttttaggttaggcgtggtgttttatatttgtaattttagtattttgggaggcggaggtaggtggattatttgagtttaggagtttaagattagtttgattaatatggtgaaattttatttttattaaaagtataaaagttagttgggtgtggtggtatatgtttgtaattttagttatttgggaggttgaggtaggagaatcgtttgaatttgggaggcggagattgtagtgagttattgtaattttagtattttgggaggttaaggtgggtggaatatttgagtttagaggtttgagattaatttgggtaatatagagagatttaatttttataaaaaaaaatttaaatatatatatttaaaaatttttaattaaaaaaatataaaataaggaaatagaggatataatatattatttataatttatattttaattaataaaggagattttttattttgtatgagtagatttgtttttttgagatggagtttcgttttgttgtttagttggagtgtaatggtgtaattttagtttattgtaatttttgttttttgggtttaagtaatttttttgttttagttttttaaatagttgggattataggtatatagtattacgttcggttaatttttatatttttagtagagatggggttttattatgttgattaggttagttttaaacgtgtagatttttataatatataaatatatatttaaatagaaataagttaggtgtagtggtttacgtttgtaattttagtattttgggaggttaaggtgggtagattatttgaggttaggttaagattagtttggttaatatggtgaaattatttttattaaaaatataaaaattagttgagtgtggtagtgggcgtttgtagttttagttatttgggaggttgaggtaggagaattgtttgaatttgggaggcggaggttgtagtaagttaaaatcgcgttattgtattgtatagtttgggtaatagagtgagattttattttaaaaaaaaaaaaaaaaattaaagtgtttttattttaaaaaagataagaaataataattagatattttttaatgtttagttgttaatatttttttgtattttagttgggttttaaaagcgagattgagatataagatttgtttttttttagtataattagatgtgtttacgtttttttggatttaaataaaatgtaaagttattttttttaaggagtatattatagataatgtgtttttttagaatgtttttttttatattagatagattggggttttttttgtttttgcgcggggggatagaattttgttttgtcgtttaggttggagtgtagtggtgcgattttagtttattgtaatttttattttttaggtttaagtgatttttttgttttagttttttaagtagttgggattataggtatttattattatattcggttaatttttgtatttttagtagagatggggttttataatgttggttagattggtttcgaatttttgatttcgggtgatttattttgtttttttaaagtgttgggattataggcgtgagttattatgtttaatttagatagattgttttataagggtttagaaagaaaggaaattatatgaatgagtatttagttttttgttttttgaagtggatgaattgttttttttggtttttaatatagtttgttaagagttgtagtacgttttaagagtatgtgtatgtagtggagttgggatggggaggatttttaagggaatttttagttgttatttatgaattatgtagagtggagaaggatatttagtttttttgtggtttttatttgtatgattattttggtggttgtaaagggcgataggtagtaggaggagatatttcgtgatattaagagttgtgtttagatatgatcgttttggtatagtttgagggttttttatagaaattggtagagatgttagatagatataagatgttagttagttttttttgcgattggtttttagaggtggaaaatggtaaagttattaggtttattttttttaggattagaggaatatgttaattatattaaagtagattagtgggtcgggtgtggtggtttacgtttgtaattttagtattttgggaggtcgaggcgggcggattatgaggttaggagattaagattattttggttaatacggtgaaattttgtttttattaagaatataaaaaattagttgggtatggtggcgggcgtttgtagttttagttgttcgggaggttgaggtaggaaaatggcgtgaatttaggaggtggagtttgtagtgagtcgagatcgtattattgtattttagtttgggtaatagtgtgagatttcgttttaaaaaaaaaaaaaaatgtagattagaacgattaaaatgattattggtgattattggtattattgttgtaatagtaaaaatatattttttttattaatgtttttgtttttttttaaaatgttttatcgttttttgattattatggtttatttttatttttattttatttatttatttatttttttaagatatagtttcgttgttatttaggttggagtgtagtggttcgatttcggtttattgtagtttttgttttttaggtttaagcgatttttttgttttagttttttgagtagttgggattataggcgtatgttattatatttggttaatttttgtatttttgtagagatagggttttattatgttggttaggatggtttcgattttttgattttatgattcgtttgttttagttttttaaagtgttgggattataggtatgagttatcgtgttcggttttattaatgttttttatttatgtatttttttttatggattttatttatttatatatggtattttatttaatatgtaataaatatttattaagtagttattgtgtgtttagtgttgggggtatagttgtgaatattattaatatggggttagatgtggtggtttatatttgtaatttcggggttttttttttttttgagatggagtttcgtttttgttgtttaggttggagtgtaatggtaagattttagtttatcgtaatttttgtttttcgggtttaaacgatttttttgttttagttttttaagtagttgggattgtagacgtgcgttattatattcggttaattttgtatttttagtagagacggggtttttttatgttggttaggttttaaatttttaattttaggtgatttgtttgtttcggttttttaaattattgggattatcggcgtgagttattatgtttagttttattttagtgttttaggaggcggaggtgggaggattatttgaggttaggagtttgtttgggtaatatagtgagagtttatttttataaaaaaatttaaaattagttaggtgtggtggtaggtgtttgtagttttagttatttaggaggttgaggtgggaggattgttttagtttaggaggtcgaggttgtaatgagttatgattgtgttattgtattgtagtttgggtgatagagtaagattttgttttttaaaagaaaaaaaaaaaaaaaaaaaaagttttggttaggcgtggtggtttatgtttgtaattttagtattttgggaggttaaggttggcggattataaggttaggagtttaagattagtttggttaatatggtgaaatttcgtgtttattaaaaatataaaaattagcggggtatggtggcgggtatttgtagttttagtaatttggggggttgagttaggaaaattgtttgaatttgggaggtagaggttgtagtgagttgtgatagtattattgtattttagttttttagtttgggcgatagagtaagattttgtttttaaaaaaaaaaaaaaaaaagaaaagtttttgttgtatagaattttttaggttatggatggggaggagggtaggggtttaggaggggagaagcggaaggaggaataaaataaagaagagataattagttggagagtgataaatattataatgatattatggaattaggtttattagattaaatattgggtatttagtttaatgtgaattttagataagtaatgtatgatttttaagtataaatatgttttatatagtatttatattagaaaattataaatttttttttaaaatttatattgatttgggtagtttgtattttatttgttaaatttggtaattttaatttgtgtgttgggtggtggtgagtgggtaattttagataggttttttttgtggaggtgatatttgagttggaatttaaatgtaaagaaggagttaattatttaggaatttagaatattttagtatagggaatagtaagtataaatgttttaaagtggaaataagtttggagtttagaggaataggaagaaggtggggtggcggagttgagtgagggtgaggagaggagggaagcggaaggtgatgagggtaggtaggttggtaggggttagattttatatggtttgtgggttgtaataagagtattaaaatttatatattaggttaggcgcggtggtttacgtttggaattttagtattttgggaggttaaggtgtgcggattatttgaggttaggagttcgagatttgtttggtcgtgtttttttttaaaatagaagttttaagaggggtaggaagttttttttcgttttagattttatgtgtacgattttggatcgattaatattgaatattttttacgtgttaagttttgatattaaaatgggttagaagttagtagtcgttcgttgaatttgtgtttttttttggaaaacgagaatcgtgaagtttgttggtatggttagagttaaagagtattgttatttgtgagattagcgtagaaatagagcggggtttcgattggtttttcgaatttgggtggggttagagtatttttggtttcgttttttgtagcgggtcgttcgtttatgcgttttggttttaggttcgttgtcgcgttattttgtcggggtttgaatgtgaggcggagcggcggtaggagcgggtagtgttagttacggttcgcggttggggttttttttttcgtttttgtatttttacgaggtgaggcgcggggcgtgtacggtttattagagtggtttttggggtttagttgaggaagggatgaggcgttttcggtattaacgagcgttagggagtgagaatcgcgtttttgggcgagagcggaatgtgggttcggggttcgggtggtgcgtttaggtaaggttttcggtttttttagggagcgtttgtcgcgtttcgcggtattttaggtttttggtttaggtgcggcgattttagggtttgtgagggttgagggtaattgaggcgcggtttaacgcgagtttgcggattgttcgtttttttttttttattacggcgttgattggttgcgtcgtcgttttttcgttcgggaaggtcgttttttattggtcgcgttcgtatgtttattttttgcgacggtggttgttagtcgcgcgagttgagtgtgcggcggcgaggtttgttcgggcggggattgcgggcgcgtggagttgcggttgtttcgcgtcgttttttgttttaattttagtgaagttttcgaatttatttttttttaatttttgtatttgtatttttgattgtaaaacgggtatcgtgattttattttgttgaattgtttgtgagaattttagtcggtatattcgggatatagaaattttttgtaacgcgggttgggggagggttttttcgttttgggagaaacgttgtgttgtggtggttcggagtatagattttggaattagatcgtttgggtttattttagacgtagtttttcgttaggggtgtaatttgaggttggttattttattttattgagtttttatttttttagttgtaaaatggggttaataatagaatttatttcggaaagtggttttgaggatgcgttgagttatttatcgtggtttataaaggttttttgggagttgacggttgtttatttattttttttatttatttttttttttagttagtgtggttttttgttttttttatattttagggttatttcgatttaaaattatttgtatatgttttttgtttgttggggaagtattaatatttttgtaaggtaggtcgttttttttaagttttttttattttaggttttttttaattaatttttttttttgtttttttttttttttttttttttttttttttttttttttttttttttttttttttttgagagagagagtttcgttttgttttttaggttggagtgtagtggcgcgatttcgatttattgtaattttcgtttttcggatttaagcgatttttttgttttagtttttcgaatagttgagattataggtttgagattatacgttattatattcggttaatttttgtatttttattagagacggggttttattatgttgattaggttgtttaattaatttgtttaggattttttttttatggttttttattaatattatttggttttagttattttatagtatttattaatatttatttattgtttatttgttattttttttaattgttagaatgtaagttgtttgagagtaaggattttgtttgttttgtttatttttttttttttggtgggtgttattttatttgtgtttgttatatggtagatgtataagtattatttttttttggaggtatagaaggggattttttagttttggattttattaattgtttttttttttattttgggtttatatagttatatttttggtttttttttgtgtgtgttttttttttttttttttttttttttgatatgtttttagaggattttaatggatttcgttttttcgtttttataattttttattttttattttttattattagtgtaagggaagtttttttttttttttgattatttttgttggttggggtttgggataggattggatggatgtaagagtagtgttttagttttggaattaatttgtttttttatttatttaataattttattgagtatttatttaatttttgggaatatagtgaaaaaataaaaatggataaggtttttttttttgaggattatgtattttcgtgggcgaaagaaaaaatattagataattttagatagtgatagaattatgtgataggtgaagaaggtttttttgaggaggtgatatttgggtagagattagttattaaaaggtgaggggtagaatattttaggtagagggaatagaaggtttaaggtttaaggataggaatcggtttggaatattgaaatatttaaggaatattttaggtttttagagtgttatatgaagaagggagaaatatttaggattcggattatagaaggttttgtaggtaatgtaaggagtttggatttgattttaagtggtatatttttatggttagaaagtagagggtaggttgaggtgttgggatatgttttttatgtgtgggtgttagatagtttttatttattggatttttttttttttttttaaatgtaaggtttcgggaatggttttttaatgtgttgaggatatatttaagaaaaaggtagatattttggattagtttatgttatagatgtttgtgagatggttttggaaaataaagtttttattttagaaatttttatttgtaattgagggtttgtgggaagatgttagatttaggtttggttatttatttaataagaagaatttggaaatttagatgtttgttataattgatttattgtgatgtttttttaagttttttaattgtgtattggtagagatttttaaagatagttacgtggagaaagaaaagtattatttttttatttaaaggtgataaaaatgaatttttatttttttttttttttttttttttggagatattattttattgtgttgtttgggttgatttgggtttagtttatttttttattttagtttttcgagtagttaggattataggcgtgtattattatatttaattaatttttattttttttttgtagagatggtattatgttgtttaggttggttttaaatttttggatttaattaatttgtttattttggttttttaaagagttgggattataggtatgagttattttatttggttaaaatgaatgttttgtttttagtttgagttatttttagattagtaatattttttgtatttatatattgttaatattttagagtgttaaagtatttttatttgtggttgtataagataattagagtttgattttgttgataattatgaatatttgtaaaatgttttttaaaagtttttgattttttttatttttttaaattaaggataagtttagaattcggttttatagattatatttgtaaggcgatataaaaaggatttgttgataaatagttttttaaagaatatttttaaagaataaattttggaaggttaaggtgggcggattatttgagtttaggagttttagattagtttgggtaatattggaattatgtttatagaaataatataaaaattagttaggtgtggtggtgtgtgtttgtagttttagttatttgggaggttgaagtaggaggatggtttgagtttaggaggtagaggttttagtgggttagaattatattattgtatttttttagtttaggtaatagatttagattttgttttaaaaaagagtattaagattttgggatttatgtagtattttaattttgagggattataatatgtatatttatataattttttatttttttttaaatttaaaaatagttttattttagtattttaatttaattattttaggttttattttattatgtggttttatttatttatttttattttattttattttattttattttatttttggagatagggttttatttagttatttatattggattgtagtggtaagattttagtttattgtagtttagatttttcgggtttaagtaatttttttgttttaatttttttagtagttaggattataggagggtattattaagtttagttaatttttttttttttttttttttttttttgagatgggagttttatttttgttgtttaggttagagttagagtgtaatggtgtagttttggtttattgaaatttttgtttttcgggtttaagtaatttttttgttttagttttttgagtagttgggattataggcgtatgttattacgttcggttaatttttttttttttgtatttttagtagagacggggttttattatattggttaggttggtttcgaatttttgattttagatgattcgtttgtttcggttttttaaagtgttgggattatagacgtaagttatcgcgttcggtttgagtttagttaatttttaaaattttttgtagagataggattttattattgttgttaagtttggttttgaacggtttttggggttaagtgatcgttttatttttattttttaaagtgttgggattatagaagtgagttattttgtttagtttgttgtggttttagaatttagaaggttgtgtttatttttttttgtttgatatagttaattaattaaaataaagatgaagaataatatttttgatggaaatattaaaggtatttagttttttaaaatagtataataaatatataacgggtgtttattattattgtaaggttttagggagagagtagtgaataaagtataaagtttttattattagtggagtttataatttagtgaagagagaagtatagtaaatgataaaagaaattaatatgtttgataaaatgtatttggaaaatagtagagtaagggtatggagagtaattgaggtgaatgtttttttagataggatggtgtagtaaggtatttttgaaaaaaagatgatatttgaaaagagtttttttaggtcgggtacggtggtttatgtttgtaattttagtattttgggaggttgaggcggtagattatttgaggttaagagtttgagattagtttggttaatacggtgaaatcgtatttttattgtatataaaatttagtcgggcgtggtggtacgtatttgtagttttagttatttgggaggttgaggtaggagaattgtttgaatttgggaggcggggattgcggtgagttgagattacgttattgtattttagtttgggtgatagagtaaagatttttgtttttaaaaaaaataagagttttgaatgagaatgaagtgggtagtgtaaattttgtagtttttcgtgtgtagagttttgtaggtagaaggaatggtaagtatagaattttgaaataaaagtaaaattattggtatgtttgaataggtaatataggataaattttatttttttttagagatagagttttattttgttgtttagattggaatgtaatggtatgattatagtttattgtagttttaaaattttgagtttaattagtttttttgttttagtttttagagtagttgagattataagtgttcgttattatgtttggttaatttttatttattgtagagatagggttttattatgttgtttacgttggttttgaaattttagttttaagtgattttttcgtttcggttttttaaagcgttgggattataggtatgagttattttgttaggttagaataaatttaaaaatttatttttttgaagtatttttgaataaataaatttaattgtggtagttaagttggttatttgtttatttgatatttatgtaattgagtttttatattatgttggggttgttaatgattgatttgaagggatagtttttagttttgattggaaatttatgttttgttgggtgattgatatgttgtgatttattttttagtttatataataaatgtttattaaatatgtattgtgtgttaggtaatgttgaaggttttgagtatatagacgaaagtttttgtttttaggagtttgtagtttagtgtgtgtatgagacgataaagaagtttattttaaatgagggtaattgttaatatagtaaaataaggatgatgtagatggtaatcgtagaaggtttttttgaagagttgatagtgggttgagtgttgaatggtgtttattattaaattagaggatgagtattattatggttagggagaatttttgtggttagtttgtagaatagaaggtttttgtgtttggaatgtagtaagagttaggaggaggtaggagatgaggttagtagatattagattgtttagattttgttgtggtaagggatttggtggtggtggtggtggtggtggttgttttggagatagggttttatttttattgtttagtttgtagtgtagtggtttgattataatttatagtagttttaatttgttggatttataggtgtgtgttattatatttggttaattttttgtatatttagtagagatagggttttgttgtgttagtttaggttggtttgaagtcggttgaagtaatttatttgttttggttttttaaaatgttgggttaataggcggtagttattgtatttggttaggagtttgggtgtttaagataagtaattatgaggaatttaaggagttttagttgagaaatatataaatgttagagaaatataatgaagaaagtgaaatgtagatttattaagaagtgtatttttaaaaattaagaaaataagttttgtgtggtggtatatgtttgtagttttagttattttagaggttgaggtaggaggattgtttgagtttaggagttagaatttaatttggataatatagtgagattttttgttttttttttttttttttttttttttttttaaagataaaatagatttgtaaatttgtttttgtattttttttatttaagtttttaataatttgttttgtatgaatttttaaaggtagaataaatttgtatatggtaaagaaaggttaattttttttaatttagatatattgatgttaatgatttaatttgattatagtaaattaatttttttttttttttttttttttttttttgagattgcgttttttttttgttgtttaggttggagtgtaatggcgtaatttcgttttattgtaatttttgttttttaggtttaagtaatttttttgttttagttttttaagtagttgggattataggtatgtgttattaggtatggttaatttttagtagagacggggttttattatgttggttaggttggttttaaatttttgattttaggtgatttgttttttttagttttttagagtgttgggattataggtgtgagttattatatttggtttaaatttttatgattttataattgatttattattttaatatagaaaaaaggaataggaaaataaatggattaaattattgttttttaaagtgtgttttattgaaaaggagttttatagttaaataatgggagagattgggtaatttttttattttagttttttaagtagttaggattatagggttatattattacgttcggttaattttttgtatttttagtagagatggggttttgttatgttgtttaggtaggttttgaatttttgggtttaagcgatcgtttgttttagttttttattagtggagattttggattaattgatgtgaattagtaattttgtgagtttaaagtgttttgtattgtgaatttttaaagtggggtaggatataatgtgtagtattttttaaatttgtgatataaaaaattataaagggtatagttttttaatagattgtatgtgtggtttaatgggatttgatttttatatttatagagtggaatatttggattagagggagtgattaggtaggtggtgggatttatttagttagaatattagttttttgtgataaatatattttttaattaaggggaaggattgtagtatgtagaatatagataattttttttagaaggttggggtttttggttgttggggagtgttttgtataagtatagtattagataatatttttttattttttggttttttatcgtttagttgttttttggttgttttttttttatattagtttttttattgtgttgtgagtgtttttatttttggttagtcgtttgttatttttatttaagaggtagttttgggtaatagaaagagggtagatttacggagttggattgatttaaatttgatttttatttattaattatatatagttaatatatgttaatttgagtgtttttttttgtgtgtaaaattattgtgtggaataaatgatatgaagtttatgaaaatatttagtatcgtgtgtttggtttatatatgtgatattttttttattttgtaaattattattagtttaaaggttttttattttatttttattatatttttatttatttaagaaaatttttatgatttttttatatattaaattatggtattttttagttaagtatggaggaatttatatgatttggttttgattttttagtttattattttttttttttatttttgttattttgtttttataatttattttggtagatgcgtttttattttattttgtttatttagatatatatattttttaaggtttagtttaaggtttaggttttgggaaatttttggatggttatataatttcgtgattttttttttaattttttaacgtttaaggtgttgtttttgtgatttatttggtattttagaggatagatgttttagaatttgggattttttttggatgtatgtattgtggattatataatatttttagtggggtttggggtagtattttgtaattaaacgtattgatatttttttagtgaaataaatttgtatattaagtgagataaatttatgttgatagttttaggtagtttaggttggttttgttgttaagtgagtttgttataaatttgttaaaaaataaatttttaagtttttttatttttggattttattattttagtaaagggtatataggtttgtatttggtattttagttgtgttttgttttttgaattattatagaagttttttttaggataggaatttgattgtatattgttataggtattttaaaaataaatgggtttcggtatggtgggttatgtttgtaattttagtgttttgggatgtcgaggtaggaaaattgtttgaggttaggagtttaagattagtttgcgtaatatggtgaaattttatttttataaaaaatataaaaattagttaggtatggttgattgcgtttgtagttttagttatttaagaggttgaggtgggaggttggggtttgagttttggaggttgaggttgtggtgagttatgattatgtttttgtagtttaatttgggttatagagtaagattttgtttgaaaaaataataaaattttttaaattttttattgtaaatgtataatagatatgtgattgtaagattagaaaagtatgaagagaataaaattttttttatatttattatcgagatgttattattgttttatattttggagtgtgttttttgtttttttttatatgtgaagtttttttttataatttgaattatgatatttttgaattttttttattgattttttttatattttataaaaattgtgtgtttagtttttttttttttttttatagaagtttttggttaatttggtgtatgatttttttgaaagggttttatttttttatttatatgtggttatatatttaaaagttgtttaatggaatttaagtataagtggagttttttaaaatcgttttttttttttttggagataaagtttcgttttttttgaggttggagtgtagtggtataattttggtttattgtagtttttgtttttaggtttaagcgatttttttgttttagttatttaagtaattgggattataggtgtatgttattatgttcggttgattttgtatttttagtagagacgggatttattatgttggttaggttggttttaaatttttgattttaggtgatttattttttttagttttttaaagtgttgggattataggcgtgagtaatcgcgtttagtttaaaatagttttattgaagtataatttatatattataagatttatttattttaagtgaattgtttgggaaatgttagtaaatttatgtagattatgtatgtgttattatagtttaattttagaatattttgttatttttaaaaagtttttttagtttgtatttaattttatcgttttattaataagttggagattataaagtttaattgataagatttttaggatttgtgatttgttggtaattatgtatatttgatatttgtattttgtgtatgtgttgtttttgtgtgtttttttattttttttttaattgagtgggtttagattttttttttttttatttttaatggataaaattgtatatatttgtggtatgtatgttttgaaatatgtatatattgtataatggttaaattaagttaattaatatattattttatatgttgtgtgtgtgtgtgtgtgtgtgtgtgtgtgtgtgtgtgtggtgaaagtatttaaaatatatttagtaatttttaagtgtataatatattattatagttattttgttgtataataaattttttgaattgtgtattttttagtttatgttgttagtagttaaatcgacgtaggttatttagttagtttaaaatttgtgggttgggtacggtggtttacgtttgtaattttagtatattgggaggttaaggtaggaggattatttgagtttaggagtttgagattagtttgggtaatattgtgagattttgtttttataaaattttttttttaatttgttatttgttagatgtgaagttttttggttagttataagtatattatgtgatttagttttgtttaagttttaaatatgaaaatttttagaattataattttagttgttattttttgaattttagaatttatttttttagatgtaaatttttagtattttgtagtatttgcgattatatgttgtatatgaaggaattttttgtttttttaattttagaattttatgtgggatatttatttgttgtttaaaattttaatttttcgttgtggggttttttttttttttttttttaagataggttttgttttattatttaagttggagtgtagtggtattattttagtttattgtaatttttgtttttaggtttaagatatttttttattttagtttttcgagtagttgggattgaaggtatttattattatgtttggttaattttttgggttggttggttggtttgttttgagacggagttttgtttttatcgtttaggttgtagtgttatggtgcgattttagtttattgaaatttttgtttttcgggtttaagcgatttttttgttttagttttttaagtagttgagattataggtttttgttattatgtttagttaatttttgtatttttagtagagacgggattttattatgttgattaggttggttttaaatttttgattttaggtgattcgtttgttttagttttttaaagtgttgggattataggtatgagttattatgttcggttttaatttttttgtagttttggtagagatggggttttattttgttgataggttggttttttaatttttgagtttaagtagtttatttattttagttttttaaagtgtcgggatttataggtttgagttattgttcgggttttttatggggtttttttaataagtttttttagtgatttttttttttttaatttttattagtttttttttatagtattaaattatataaattttttggtgatttcgagtagttttttagtttttttttttatgattatttttttgaaattttgggatttttttttattttttttattataaaattgttttattattgtttttgggggaaaaggtatattttatttgttggatttttgttttagagttaggtttattgtttatataaaaaataatagatggatgatttttagagagaataatttataatataaacggatttttttaaatgtaaattatttttttcgtaagtgattagttatttaaattttattttatattttaga

SEQ ID NO: 304 - DNA, 17142 bp, Artificial Sequence
  chemically treated genomic DNA (Homo sapiens)
tttaaaatataaaataaggtttggataattggttatttacggaaaaagtgatttatatttaaagaaattcgtttatattatgggttattttttttgaaagttatttatttgttgttttttatatgggtagtaaatttgattttgagataagagtttagtaaatgagatgtgtttttttttttaaaaataatagtgagataattttgtgataagggagatgaaaaaaaattttaaaattttaaaaagatagttatagaaaaaaaagttgaaggattgttcgaagttattaagaagtttatatgatttaatgttatgggaaagggttaataaaggttaagaaaaaaaaaattattggaggaatttattaaagaagttttataaggagttcgggtagtggtttaggtttgtaaatttcgatattttgggaggttgaggtgggtggattgtttgagtttaggagttaagagattagtttgttaatagggtgagattttatttttattaaaattataaaaaaattgaagtcgggtatggtggtttatgtttgtaattttagtattttgggaggttgaggtaggcggattatttgaggttaagaatttgagattagtttggttaatatggtaaaatttcgtttttattaaaaatataaaaattagttggatatggtggtaggagtttgtaattttagttatttgggaggttgaggtaggagaatcgtttgaattcgggaggtaaaggttttagtgagttgagatcgtattatagtattgtagtttgggcgataagagtaaaatttcgttttaaaataaattaattaattaatttaaaaaattagttaggtatggtagtgggtgtttttagttttagttattcggaaggttgaggtgggaagatgttttgagtttgggggtagaggttgtagtgagttgagatggtgttattgtattttaatttgggtgatggagtaagatttgttttaaaaaaaaaaaaaaaaaaggttttataacgagaaattaaaattttaaatagtaaataaatattttatataaagttttgagattaaagaaataagaaatttttttatgtataatatgtaatcgtaaatattataaagtgttaagaatttgtatttagggagataaattttagagtttagaagatgatagttaagattatgattttagaagtttttatatttaaagtttaaataaaattaaattatataatatgtttataattgattaaaaaattttatatttaatagatgataaattaaaaaaaaaattttgtagagatagggttttataatgttgtttaagttggttttaaatttttggatttaagtgatttttttgttttggttttttagtgtgttaggattataggcgtgagttatcgtgtttagtttataaattttaagttaattaaatggtttacgtcgatttaattattaataatataggttaagaaatatatagtttaagagatttattgtataataaggtgattataataatgtattgtatatttgaaaattattgggtatattttaagtgtttttattatatatatatatatatatatatatatatatatatatatagtatgtgaagtaatatgttaattagtttgatttagttattatataatgtatatatattttaaaatatgtatattataaatatatataattttgtttattaaaaatgggaaaaaaaggagtttgaatttatttaattaaaaggaaaatgaaaaaatatatagaaatagtatatatatagagtataagtgttagatgtgtatgattattaatagattataaattttgggaattttattaattgagttttatggtttttaatttgttggtgagacgataaaattaggtgtaaattgagggaattttttgggggtgatagagtgttttaaaattggattgtggtgatatatgtataatttatataaatttattaatattttttaaatagtttatttaaaatggataaattttatagtatgtaaattgtattttaataaagttattttaggttgggcgcggttgtttacgtttgtaattttagtattttgggaggttgaggggggtggattatttgaggttaggagtttgagattagtttggttagtatggtgaatttcgtttttattaaaaatataaaattagtcgggtatggtggtatgtatttgtaattttagttatttgggtggttgaggtaggagaatcgtttgaatttggaggtagaagttgtagtgaattaagattgtgttattgtattttagttttagaaagagcgagattttgtttttaaaaaaaaaaaaagcgattttagaaaattttatttatgtttagattttattaggtagtttttagatatatagttatatgtagatgggaaagtggagtttttttagggaaattatgtattaaattaattagaggtttttatgaaaaagaagaaaaaaattaaatatataatttttgtaaaatgtaaaaaaggttagtggaaaaagtttaaggatattataatttaaattatgaaaaaaaattttatatatagaagaaaataaaaaatatattttaaaatgtagaatagtgataatatttcggtgatagatataaggagagttttattttttttatatttttttaattttataattatatatttattatatatttatagtaaggaatttaaaaaattttattatttttttagatagagttttgttttgtggtttaggttggattgtaggggtatgattatagtttattatagttttaatttttagggtttaagttttaattttttattttagttttttgagtagttgggattataggcgtaattaattatgtttggttaatttttgtattttttgtagagatggggttttattatattgcgtaggttggttttgaatttttgattttaagtaatttttttgtttcggtattttaaaatattgggattataggtatgatttattatatcgggatttatttatttttaaaatgtttatgataatatgtaattaagtttttgttttagaaggagtttttgtaatagtttagaagataagatataattgaaatgttaagtataggtttatatattttttattaaagtgatgaaatttaaaaataaaaaaatttaaaagtttgttttttaataagtttgtggtaaatttatttggtagtaaaattagtttgaattgtttgaggttattaatatagatttattttatttagtatgtaaatttgttttattaaagaaatattaatacgtttgattatagggtgttattttaagttttattggggatgttgtataatttatagtatatgtatttaaaaaaaattttaaattttgaaatatttgttttttgaagtgttaaatgaattataaagatagtattttaaacgttagaaaattaagaagggagttacggggttatgtggttatttaagagttttttagagtttgagttttgagttgaattttgaaaaatatgtgtatttgaataggtaaagtaggatgagggcgtatttgttaaaatgaattgtgagagtaaagtaatagagatgggaagagagaatagtgggttaggagattaagattagattatataggtttttttatatttggttgaagagtgttatgatttaatgtatggggaagttatgaaggtttttttaagtgggtaaaaatgtaatgaaagtggagtagaggatttttgggttggtaatggtttgtagaatgggggaagtgttatatgtatgaattaggtatacgatgttagatgtttttataggttttatattatttattttatataatgattttatatataaagaagggtatttaggttgatatatattaattatatatggttaataaataaagattagatttaaattagtttaatttcgtaggtttattttttttttattatttaaggttgttttttaggtggaaatgatagacggttgattaagagtgaaagtatttataatataatagaaaggttgatgtgaaaagagggtagttagaggataattgagcggtggggagttagaaaataagaaaatattatttaatgttgtgtttatgtagggtattttttaatagttagaaattttaattttttaaagagaattatttgtattttatatgttgtagtttttttttttaattagaaaatgtgtttattataggaagttaatgttttgattgagtagattttattatttatttaattattttttttaatttaggtgttttattttataggtgtgaaaattaagttttattaaattatatatataatttattgagaggttatattttttatggttttttatattataagtttggaaaatgttatatattatattttgttttattttggagatttataatataaagtattttaaatttataaagttattggtttatattaattaatttagagtttttattggtgggaggttgaggtagacgatcgtttgagtttaggagtttaagatttgtttgggtaatatggtaaaattttatttttattaaaaatataaaaaattagtcgggcgtggtggtgtggttttgtagttttagttatttgggaggttaaggtgggaggattgtttagttttttttattatttggttatagaatttttttttaatagaatatattttggaaagtaatgatttaatttatttatttttttattttttttttttgtattgaaatggtggattagttatgaaattatgaaagtttgggttaggtgtggtggtttatatttataattttagtattttgggaggttgagaggggtagattatttgaggttaagagtttgagattagtttggttaatatggtgaaatttcgtttttattaaaaattagttatgtttggtagtatatgtttgtaattttagttatttgggaggttgaggtaggagaattgtttgaatttgggaggtaaaggttgtaatgaggcgagattgcgttattgtattttagtttgggtaataagagagaaacgtagttttaaaaaaaaaaaaaaaaaaaaaaaaaaaagttagtttgttgtggttaagttaaattattaatattagtgtatttgagttaaaggaaattggtttttttttgttatatgtaaatttattttatttttggggatttatgtaaggtagattgttagaaatttgggtggggagggtgtaggggtagatttatagatttattttgtttttaaaaaaaaaaaaaaaaaaaaaaaagagagatagggggttttattgtattgtttagattggattttaatttttgagtttaaataatttttttgttttagtttttggaatagttgggattataggtatatgttattatatagggtttatttttttgatttttaaaaatatattttttaataaatttgtattttattttttttattatgtttttttagtatttgtatattttttaattaaaattttttagattttttataattatttgttttaaatatttaaatttttggttaggtgtagtggttgtcgtttgttagtttagtattttgggaggttaaggtaggtggattgttttagtcggttttagattagtttgggttaatatagtaagattttgtttttattaaatatataaaaaattagttaggtgtggtggtatatatttgtagatttagtaaattgagattgttgtgagttgtgattaggttattgtattatagattgggtaatgggagtgagattttatttttaaaataattattattattattattattattaaattttttattatagtagggtttaagtaatttggtatttattgattttattttttatttttttttggtttttgttatattttaggtataaaagttttttgttttataaattggttataagagttttttttgattataataatgtttattttttaatttgataatggatattatttagtatttagtttattgttaattttttaaaaaggttttttacgattattatttatattatttttgttttattgtgttagtaattatttttatttgaaataaatttttttgtcgttttatatatatattagattgtaagtttttgagggtagggattttcgtttgtatgtttaggatttttagtattatttggtatatagtatatatttagtaagtatttgttgtatgaattaaaggataagttataatatgttagttatttagtaaaatatgagtttttagttaagattggagattatttttttagattaattattagtagttttaatataatgtgggaatttagttgtatgaatgttagatgaataaatgattaatttaattgttataattaaatttgtttatttaaaagtattttaagaaagtgaatttttagatttgttttggtttggtagaatggtttatgtttgtaattttagcgttttggaaggtcgaggcggaaggattatttgaggttaggattttaagattagcgtgggtaatatagtgagattttgtttttataataaataaaaattagttaggtatggtggcgagtatttgtagttttagttgttttggaggttgaggtagaaggattggttaagtttagaattttaaggttgtagtgagttatgattatgttattgtattttaatttgggtaatagagtaagattttgtttttgaaaaaagataaaatttattttgtattatttgtttaaatatgttagtgattttatttttgttttagggttttgtatttattattttttttgtttgtagagttttgtatacggaaagttataaggtttgtattgtttattttatttttatttaggatttttgttttttttggagataggggtttttgttttgttatttaggttggagtgtagtggcgtgattttagtttatcgtagttttcgttttttaggtttaagtaatttttttgttttaattttttaagtagttgggattataggtgcgtgttattacgttcggttgagttttatatatagtaaagatgcggttttatcgtgttggttaggttaattttaaatttttgattttaggtgatttgtcgttttagttttttaaagtgttgggattataggtatgagttatcgtgttcggtttggaaggattttttttaaatgttattttttttttagagatgttttgttgtattattttatttaaaagagtatttattttagttattttttatgtttttattttattattttttaagtatattttattaggtatattaattttttttgttatttattgtgtttttttttttattagattgtaaattttattgatagtagggattttgtgttttgtttattgttttttttttagagttttataatagtgatgagtattcgttatatatttgttgtattattttaaaaagttagatatttttgatgtttttattaaaaatattattttttatttttattttggttggttgattgtgttaaatagaaagaggtggatataattttttagattttaaaattataataggttgagtaaggtggtttatttttgtaattttagtattttgggaggtggagatgggacgattatttgattttaaggatcgtttaagattagatttggtaataatagtgagattttgtttttataaaaaattttaaaaattagttgggtttaggtcgggcgcggtggtttacgtttgtaattttagtattttgggaggtcgaagtaggcggattatttgaggttaggagttcgagattagtttgattaatgtgatgaaatttcgtttttattaaaaatataaaaaaaaaaaaattagtcgggcgtggtggtatgcgtttgtaattttagttatttaggaggttgagataggagaattgtttgaattcgggaggtagaggttttaatgagttaagattgtattattgtattttagttttagtttgggtaataaaagtgaaatttttattttaaaaaaaaaaaaaaaaaaaaaaaaaaattagttgggtttggtgatatttttttgtggttttagttattagggaagttgaggtaggaggattgtttgagttcgggaggtttaggttgtaataagttgaggttttgttattgtagtttagtatgggtgattgagtgaaattttgtttttaaaaataaaataaaataaaataaaataaaataaaaataaataaataaaattatataatagaatgaaatttaaaatgattaagttgagatgttagggtaggattatttttaagtttaaaaaaaagtgaggggttatataaatatgtatgttataattttttaaagttaaaatattatatagattttagaattttaatatttttttttgagatagggtttgggtttgttatttaggttggagaaatgtagtggtgtaattttggtttattgaaatttttgttttttgggtttaagttatttttttattttaattttttaagtagttgggattataggtatatattattatatttggttaatttttgtgttgtttttgtagatatggttttagtgttgtttaggttggtttggaatttttgagtttaagtgattcgtttattttggttttttaaagtttattttttgggaatattttttaaggaattatttgttaataaattttttttatatcgttttgtagatatagtttataaaatcgaattttaagtttatttttaatttgagaaaataagagaaattagggatttttagagaatattttataggtatttataattattaataagattaagttttaattattttatgtaattataagtaaaggtattttgatattttgaaatattagtaatatataaatgtaaaaagtgttattgatttaaaaatgatttaaattagaaataaaatatttattttggttaagtagggtggtttatgtttgtaattttagttttttggggggttaaggtaagtagattggttgagtttaggagtttgagattaatttgggtaatatggtgttatttttataaaaaaaaaataaaaattagttgagtgtggtggtgtacgtttgtagttttagttattcgggaggttgaggtaggaggatagattgagtttaggttagtttaggtaatatagtgagatggtgtttttaaaaaaaaaagggagggagaagataagaatttatttttattatttttaaatgagggggtgatatttttttttttttacgtaattatttttggaaatttttattaatatataattaagaaatttaaaaaagtattataataaattagttatggtagatatttaaatttttaagttttttttgttgaatgaatggttagatttaagtttagtatttttttataggtttttaattataggtggagatttttggaataaaagttttgttttttaaagttattttatagatatttgtgatataagttgatttaagatgtttgttttttttttagatatgtttttaatatattagagaattattttcgaggttttatatttgggaagagggaaagagatttaatgaatgaaaattatttggtatttatatatgaagaatatattttaatattttaatttattttttgttttttaattataggaatatattatttagaattaaatttaaattttttatattgtttataaagttttttatgattcgggttttggatattttttttttttttatgtaatattttaggaatttaagatattttttaaatattttaatattttaagtcggtttttgtttttgagttttgagttttttattttttttatttggaatgttttgttttttattttttaatggttggtttttatttaaatgttatttttttagaaaagttttttttatttgttatataattttgttattatttgaaattatttaatgttttttttttcgtttacgagaatatatggtttttaagggaagggattttgtttatttttgtttttttattatatttttagagattaagtggatgtttaataaagttattaaatgaataaagaaataaattaattttaaaattagagtattgtttttgtatttatttaattttgttttagattttaattagtagaagtaattagaaggggagagagattttttttgtattgatggtaagaagtgaaagataaagggttgtaggagcggagagacgaggtttattaggattttttgaaagtatgttaaaaaaaaaaaaaaaaaagagagagatatatatagagaaaggttaaagatatgattatgtgggtttaaggtgagaaaaagagtaattggtggaatttaagattaaagggtttttttttgtgtttttaaggaagaataatatttgtgtatttattatgtggtaagtataggtgggatggtatttattagggagagagaagtaagtaagatagataaggtttttgtttttaaatagtttatattttagtagttgagaaagataataagtaagtaataagtaagtgttagtaaatgttatgaagtaattaaaattaggtgatgttgatggagagttatgggagaaaggttttagataggttgattagatagtttgattaatatggtgaaatttcgtttttaataaaaatataaaaattagtcgggtgtggtggcgtgtagttttagatttgtagttttagttattcgggaggttgaggtaggagaatcgtttgaattcgggaggcggaggttgtagtgagtcgagatcgcgttattgtattttagtttgggaggtagagcgagatttttttttttaaaaaaaaaaaaaaaaaaaaaaaaaaaagaaaagagaaaagaaaaagaaaaagaaaataaaagaagaggttggttaggggaggtttaaggtgagggaaatttgggagaggcggtttgttttgtaaaaatgttggtatttttttagtaaataaaaggtatgtgtaaataattttaaatcggaataattttggaatatggaagaaatagaaagttatattggttaaggagaaagatgggtgggagagatgaataaataatcgttagtttttagggaatttttgtaaattacggtaaataatttagcgtatttttaaagttatttttcgaggtagattttgttattaattttattttgtagttaaggaaatggaggtttagtgagatgaggtgattagttttaagttatatttttaacgagaggttacgtttggaatgaatttaggcgatttaattttaaagtttatgtttcgaattattatagtatagcgttttttttaaaacgagggaatttttttttaattcgcgttataggggatttttatgtttcgggtgtatcgattagaatttttataaataatttagtaaagtgagattacgatgttcgttttatagttagggatataagtatagaggttagagaagggtgagttcgggggttttattagagttagggtaagggacgacgcgaggtagtcgtagttttacgcgttcgtagttttcgttcgggtaggtttcgtcgtcgtatatttagttcgcgcggttagtagttatcgtcgtagagaatggatatgcgagcgcgattaataaggagcggttttttcgagcggagaggcggcggcgtagttaattagcgtcgtgatggagaggaaagggcgggtaattcgtaggttcgcgttaggtcgcgttttagttgtttttagtttttataggttttggggtcgtcgtatttgggttagagatttaggatgtcgcgaggcgcggtaagcgttttttagggaagtcgaagattttgtttgagcgtattattcgaatttcgggtttatatttcgttttcgtttagaggcgcggtttttattttttagcgttcgttagtatcgggagcgttttattttttttttagttgggttttaagagttattttggtaggtcgtgtacgtttcgcgttttatttcgtggggatatagaaacggaggagggaattttagtcgcggatcgtagttggtattattcgtttttgtcgtcgtttcgttttatatttaaatttcggtaaaatggcgcgatagcgagtttgaggttagagcgtatgagcgagcggttcgttgtagggggcggggttaggaatgttttggttttatttaagttcgaagggttaatcggggtttcgttttgtttttgcgttgattttataagtgataatgttttttggttttgattatgttagtaggttttacggttttcgttttttaaagaggaatatagatttagcgagcggttgttggtttttgatttattttgatgttagggtttggtacgtaggaggtgtttaatgttgatcgatttaaggtcgtgtatatagggtttaagacggaagagaattttttgttttttttggagtttttattttagagggagatacggttagataggtttcgaatttttggttttaagtgattcgtatattttggttttttaaaatgttgggattttaggcgtgagttatcgcgtttggtttggtatgtaagttttggtatttttattatagtttataaattatatgggatttggtttttgttagtttgtttgtttttattatttttcgttttttttttttttttatttttatttagtttcgttattttattttttttttgtttttttaagttttaagtttatttttattttagagtatttatatttgttgttttttgtgttgggatgttttagatttttgaatgattggttttttttttatatttaggttttagtttaaatgttatttttataaaagaggtttatttgaaattgtttatttattattatttagtatataaattagggttgttaggtttagtaaataaaatgtaggttgtttaggttaatgtaaattttagaaaaaaatttataattttttagtataaatattgtgtaggatatatttatatttaaaaattatgtattgtttatttgaaatttatattgaattgggtgtttagtgtttgatttggtaagtttagttttatgatattattatggtatttattattttttaattaattgttttttttttattttgttttttttttcgtttttttttttttaaatttttgtttttttttttatttataatttaagggattttatatagtaagggttttttttttttttttttttttttaaagatagagttttgttttgtcgtttaggttggagggttggagtgtagtggtgttgttatagtttattgtaatttttgttttttaggtttaagtaatttttttgatttagttttttaagttattgggattataggtgttcgttattatgtttcgttgatttttgtatttttagtagatacggggttttattatattggttaggttgattttgaatttttgattttgtgattcgttagttttggttttttaaagtgttgggattataggtatgagttattacgtttggttagggtttttttttttttttttttttttttttaagaggtagggttttgttttgttatttaggttgtagtgtaatggtataattatagtttattgtaatttcgattttttaggttaaagtaatttttttattttagttttttgagtagttaggattataggtatttgttattatatttggttaattttgaatttttttgtagagatgagtttttattatgttgtttaggtaaatttttggttttaagtgatttttttattttcgttttttaaagtattgggatagggttgggtatggtggtttacgtcggtaattttagtgatttgggagatcgaggtaggtagattatttgagattgggagtttgagatttgattaatatggagaaatttcgtttttattaaaaatataaaattagtcgggtgtggtggcgtacgtttgtaattttagttatttgggaggttgaggtaggagagtcgtttgaattcgggaggtagaggttgcggtgagttgagattttgttattgtattttagtttgggtaataagagcgaaattttattttaaaaaaaaaaaaagtttcgggattataggtgtgagttattatatttagttttatattgatggtatttatagttgtatttttagtattaggtatatagtagttgtttaataaatgtttgttgtatgttgaatgaaatgttatatataaataagtgaagtttatggagaaagatatatgagtgaaagatattggtgaggtcgggtacggtggtttatgtttgtaattttagtattttggaaggttgaggtaggcggattatgaggttaggagatcgagattattttggttaatatggtaaaattttgtttttataaaaatataaaaattagttagatgtggtggtatgcgtttgtagttttagttatttaggaggttgaggtaggagaatcgtttgaatttgggaggtagaggttgtagtgagtcgagatcgagttattgtattttagtttgggtgatagcgagattgtgttttaaaaaaataaataaataaataaaataaaaataaaaataaattatgatggttagaagacggtggaatattttaaaaaaaaataaagatattggtgaaaaagatgtatttttattattgtagtaatagtattagtaattattagtaattattttaatcgttttaatttgtatttttttttttttttgagacggagttttatattgttgtttaagttggagtgtagtggtgcgatttcggtttattgtaaattttattttttgggtttacgttatttttttgttttagtttttcgagtagttgggattataggcgttcgttattatgtttagttaattttttgtatttttagtagagatagggttttatcgtgttagttaggatggttttgattttttgattttatgattcgttcgtttcggttttttaaagtgttgggattataagcgtgagttattatattcggtttattaatttattttaatataattaatatgtttttttagttttagggagaatgagtttgatgattttattattttttatttttaagagttaatcgtaaaggaggttggttggtattttgtgtttgtttagtatttttattagtttttgtagaaaatttttaagttgtgttaagacgattatgtttggatatagtttttggtgttacggggtgtttttttttattgtttatcgttttttgtagttattagaataattatgtaggtgagagttatagaaaggttgagtgtttttttttattttgtatggtttatgggtgatagttaaagatttttttgggaattttttttattttagttttattatatgtatatatttttggggcgtgttataatttttaatagattgtgttggaaattaaagaaaataatttatttattttaaggagtaggagattaagtatttatttatgtagttttttttttttttaaatttttataaaataatttgtttaggttgggtatggtggtttacgtttgtaattttaatattttgggaggataggatgggttattcgaggttaggagttcgagattagtttggttaatattgtgaaattttatttttattaaaaatataaaaattagtcgggtgtggtggtgggtgtttgtaattttagttatttgggaggttgaggtaggagaattatttgaatttgggaggtagaggttgtagtgagttgaggtcgtattattgtattttagtttgggcgataaagtaagattttgttttttcgcgtaaaaataaaaaaaattttaatttgtttaatgtaaggaaagatattttgaaaagatatattgtttatggtgtgttttttgaggaagataattttatattttatttggatttagaagggcgtggatatatttggttatgttgggaaagaataagttttatgttttaatttcgtttttaaagtttaattgagatgtagaagagtgttaatagttaaatattgagaagtatttgattgttgttttttattttttttaaaatggaggtattttaatttttttttttttttttgagatggaattttattttgttgtttaggttgtatagtatagtggcgcgattttggtttattataattttcgttttttaggtttaagtaatttttttgttttagttttttaagtagttgggattataggcgtttattattatatttagttaatttttgtatttttagtagagatggttttattatgttggttaggttggttttgatttgattttaggtgatttgtttattttggttttttaaaatgttgggattataggcgtgagttattgtatttggtttatttttgtttaaatatatgtttatatgttataaaaatttatacgtttgagattagtttgattaatatggtgaaattttatttttattaaaaatatgaaaattagtcgggcgtggtattgtgtgtttataattttagttatttgggaggttgaggtaggagaattgtttgaatttaggaggtagaggttgtagtgagttgagattgtattattgtattttagttgggtaatagagcgagattttattttaaaaaaataaatttatttatataaaatgggaaattttttttattaattaggatataagttgtaggtaatatattatgttttttatttttttattttatatttttttaattaaaaatttttaaatgtatatatttaaatttttttttgtagggattgggtttttttgtgttgtttaggttggttttaaatttttgggtttaagtgttttatttattttggttttttaaagtgttgggattatagtggtttattgtaattttcgttttttaggtttaagcgatttttttgttttagttttttaaatagttgggattataggtatgtgttattatatttagttaatttttgtatttttagtagagatggggttttattatgttggttaggttggttttgaatttttgagtttaggtgatttatttgttttcgttttttaaagtgttggaattataggtgtgaggtattacgtttgatttagaagtgtattt

SEQ ID NO: 305 - DNA, 11812 bp, Artificial Sequence
  chemically treated genomic DNA (Homo sapiens)
tgtaagttttttttagagaatgttgttttttttttttttgtattttttggatttagaatagtgtttagtatgttgtaagtatttagtttaaattgaataaattaataattattatttataagattgaaagtttttgtggttacggattaatatttattgattatatatttttagtaatatttagtttagtattttgtatgtggtaaaagtttagaatgtttgttaaatagaattgtattttatttttttttgttttttaaagatgttttttgtttttttttggaaagtttttatattgttatttgtttttttattttttatgttttattttatttttgtttttttttttgtttatattttattataattttttgggattttaggaaattttaaattataattgttattttttaatttttagaggttatatagattatgttttataatttagtagtttatattaatatgtattttttgttttatgggtatttatttttgtttttttaataatattgtaaatggtataatggtagagattatataatatttttatattattgaaaatatataaggtgatatgtattgtaagtaatcgataattatattaatttatttagaatagtatttttatttgtttattagatatgattatttagatatttaatagagattttattttgtttgaaatagaattttttgtttaagtatttatgtatatttttttgttattttattttatatattggttattagaagggatttagttttttaagtttaaagtgtaggaataaattttttaattttgaaatagaagatttatatgtagttgtaagattaatttgtaagtataggggagattttatttgttttttatttaatttattttaatggtaatattttgtaaaattataatatagtttagtatatttttaaattattaaatagagatgtaatttagtaattttatttttatatatatatttgagtaaattgaaaatatatgtttataaaaatatttgtgtacgaatgtttatagtagtattattattattattattattattattattattattttgagatagagtttcgttttgttatttaggttggagtgtagtggtgcgattttagtttattgtaatttttatttttcgggtttaagtgatttttttgttttagttttttaagtagttgggattataggcgtatgttattacgtttggttaatttttgtatttttagtagagatggggttttgttatgttggttaggttggttttgaatttttgaatttaagtgatatttttattttagttttttaaagtgttgggattattatagtaatattatttttaatagttaaaagatggaaattatataaatttttatttatagatgaatgcgtaaataataagtggtttataattataatggagtattatataaatataatggttataaaaaggaatgaagtattaatatttgttataatttggatgaattttgaaattattatgtaaagtgaaaaaagtgggatattaaaggttatatattatacgattttatttatataagtattttgaatagggaaatttgtatcgataggaagtggttgtttagggttggagtgaggggaatggaaggataggggagttatttttaattaaagggtataaggtttttttttgaagtgatgaaaatgttttataattgattgtggtgatgattgtatttatttgtgtatgtttgtggaattgtatattttaaatgggtggattgtttggtatataaattttattttaataaagttgttgaaaataaaatataaattatagtataatagtataattaggataatgatatagttaagattttgagtattttattattataaaaatttttgttattgttttttatagttatttttattttttttttatttttatattttttttaatttttggtagttattaatttagtttttatttttataattttgttatgtaaaaatattatgtaaataaaataatttaatatgtaatatttgggaattaattttttttttttgaaatggagttttattttgttgtttaggttggagtatagtggtgagattttagtttattgtaatttttatttttttggtttaagtaatttttttgttttagttttttgagtatttgggattataggtgtacgttagtatgttttgttaatttttttgtatttttagtatagacggggttttattatgttggttagattggattcgattttttgattttaggtaatttatttgttttagttttttaaagtgttgggattttaggtatgagttatcgcgttcggttgggaagtaatttttatttatttagcgtaattttttggaaatttattaaggttgttgtgtgtatagttagtttttttttttttagttgagtagtatttttagaaattattttgatttttatttttttttatttattatatttaatttaggagtaagttttgttggttttattattaaagtttattttagattttattttttttcgttatttgtatgaatatatttgtttatattattattagttttcgtttagtttgagaatattaaattgattttgttgtttttatttttgtttttttataatttatttattatataatagttagaatatattttaattaaaaatttttatattaggttaggtgtagtggtttatatttgtaattttagtattttgggaggttgaagcgagcggattatgaggttaggagattaagattattttggttaatatggtgaaatttcgtttgtattaaaaatataaaaattagttgggtacgtgtttgtagttttagttatttaggagtttaaggtagaagaatcgcgtgaattcggtaggtagaggttgtagtgacgcgagatcgtattattgtattttagtttggtaacggagagagatttcgttttaaaataaataaataaataaattttatattattttttaaaggtttattttttttttttatttatatatatatttaaaaatatttattgagtgttaattatatattgggtattgtttagattttcgagaagtagttattatatttaaaataatgataaaatttttgattttgtggaattaatataatagttagggaagattaaaagtaaataaaataagtaaaatattgtaaaataaaaaaaataaagtaggaaagtaagatgagaagtttttgtaggtaggttagttatatttttaaatagattggttagggaaggttttattgagtagatgatatttgagtaaaatatgaaggagatagggaaagagttatgtagataattgggagaagaatatttcgggtagaggtaatagtaaatataataggataagatgaaagtaggatgggagtagttgaggaattgaagggaaatttgtgtggttggagttaagtgagtaagaggggaatatttaggagatgaggttagagaggtaatgggtttagatgatttattggtttgttaggttatttataatatttattatattttttattttaaatgagatagtaagttttggagatttttaagtataatttgatttttaaaattttattttggttgttttatgaagaataaagtataggaggaagaggggaagtaaggtgattagtgacgaggtgatttttaaaattaaagtaggagatagtggtggtgtgtattagagttgaaatttcggaggtggtgtgaattgattgggtttgaatatgtcgtaaagattagagttaaaaggttttttggtagattttatgtatagtgtaagagaaaaagttaatgatgattttaaggttttgagtttggggaattgtatagatggagtggttatttatcgaggtgaagagtgtagttggagtaggtttggtaagttatatggggaaatttggtttgggataagtttacgttgaaatgttgggtatatttgagtttgggattaatagttagttttgcggttataatttgggagttgttaatgtgtagattgtatgtaaaggacgttattatttagggtattggtttagatggagaagaggtttaagatttttggggttttttaaaatgaaaaggtttaaaagatgagaagtaattagtaaaggatattgtagagtatttagaaaaaaattttatattttttattataattatgatttgatttttgttaaattttttaattttattttttagtatatataggttatttaatttttgaaacgtatatattaagtttttttttgttttatggttattgtttttgttgtacgttttaataattatgtttttattttggttttagttttaattattttttttttttattatagtttttagttaatttgttattttattagatttttttttaatttttttaatttttatttgagttttttttaattattttaattaaataggtttaatttaattatttttattaaattatggtttttattatatttgaaatttgttttatttattttttgtttaaaaatttatttttattttaataatcgtttataaaatgattagcgtatgttaaatgaaaaagtttagatatttttttttgtatgtaattttttggaaagtaggggtttttttatgttgttttttgtcgtattttaatgtagttatattgttttagtaattaattttgagtttttaatagttattaacggaatagattgtaagttattgattggtaatcgaaggttagtattagaaagaggatatcgataaatttataaatagagggatttgttttcgttattcgcgttttaacgtaaagggtgggataattcgcgcgtatgcgtcgttgttttttgttttttagggtaaatttcgtttttttttttaggttagttttattatagtatatgcgtagtataggatttgtttgttcgtttgtcggcgttattaataaagttttagtgagtatagatttttttttttttggtaagatggcggagtacgatttgattattcgtatcgcgtattttttggatcggtatttagttttttcgttttttgaatttttttttgtaaaggaggtgagggggtttttgggcgtaaggaaggcgtgggggcggatgaggtgttgagtaaggtcgaaaggtggtgtttgtagttttaggtttgatacgtgcgaggcggtcgcgagtttggtttttggacggatattaaggattttttggtagtttagcgtcgttttagttaagaagtatcgtattattcggtagtgaggaggagggaggttacggagagagaaaagaagttttttttatttattgaggtgttagtgcgggagggattttcgtattattttttttcggaagttggcgattcgttggtttcgttagagaacgttagagttttataggttggtttgtaaaagtaatttggagtgttgttagagtttttgattttttttttgggaattgtgggaagtttgggtttggttgtgggtttttgtatgtcgagttttttggagtgatttttttatatttaaaataagtatttagcgttttaatttttatgaagttgtgagttttttgcgtttttttgttttggttaagtaggattttttagaatagtatatttcgttagatggggacggcgttttttcgtttttttttttagaaaaaatttttttaatttttaaatgtgttttttagtggatatattgtattgattttatgtggtttgaattggtcgttaatatttaattatttatttaagatattatgaataaatgtgtaattttggaattttattttaaagtatatgttagttttaaaagttttattggatttgaaagttttggttaaaagaaaattgatattagttatatcgtgagtttattgggaaattgatgtattttaataatgtaaagtaatttgtagtgatgaaggaattcgaatttttttagaaaaataagtgagttttgtttttggaagtagattataatataagtttatttagggaattttagatttggggagtggattttgtgtagtaaaagataaaaagtaataaaataaaaacgttttaaaaattagcgtttaggtgttgtggttcgttagataggtataatttttatatttatatgtattttttttaaatatagataattttaaagttgttgacgttaggtaacggttaagattatttttagtaaatgtttaagaatgttttgttatgtaaaatttttttttgatatatttttgttttgatttttttttttatatttgtattttagattttgagtaaaatattcgtatttgtattgtttttttttttggaaaagtgaggataaaagatttagtaaaaatgttatattttgaaagtttttattagttgtttgtagaagtatttttgaattagttgaattttatatatttttgtgttttttataattttattttttttatggtatatagaaggaaaggaggaatatgtaaatgtgaattagatttttatagggttagacgaaaattatgaattgtaggtagttgagaattagtgggaaaaattgtttaatatttatttttttggagaaaatgttggtaagatagttgtaatatattaagaggaagatagatgttggagtatttaattagtaattgttaagtatatttgatttttggatagtataggggttaggaacgttgagttttcgtagttaaaaattcgttataagttttgatttttttaaaatttaatatattttaatgttgataggaaggtttattgagaatatggatagttttgtgttgtatgtgttttatattgtattattataataaagtaagttagagaaaataaaatggttttaaattataaggaagagaaaatatatttattttttagtaagtggaagtatattattatgaaggtttttattgtttttatattgagtaggttgaggaggaggagtaaaaggaggggttggttttgttgttttaggggtagtagaggtggaagaagtagaggaagtggatgggaagttaggaaaggtaggtatatttggtgtaatttttattgaaaaaaagttgtgtatacgtggatttgtgtggtttaaatttttgtcgtttaagggttaattgtatagggttatataattgagaaatttaagataaaatttagatattttattattaaataatttatttattttttagagttgaatgtttttgatataaggtaaaaataaatgtcgaagaggtaggtattggtagagtgttattaaaattgagattttgttatttttagtgagtaaagaggattttgaggaggtgaggttttgagttttgaaggtaaaatggttagaatagagttagtgattttgttatgtgaggatatagtagttttttttttttatatttttttagtagttttaatttttgtagttttagttatttatggtttaaaaatattaaatggaaaattttagaaattagtaattcgtaagttttaaattgttcgtttttttgggtagtaggatgaaatttgtttcgtttttttgtttaaaattgggatatgaattatttttttgtttaatgtatttatattgtatatgttaatttaattgttttattttgttattgtttattttttgtttttagtttataaattaaattttattataggtatgtatgtataggaaaaaaatagtaaatataggattggggttatttgtagttttaggtagtagtcgttggggggttttggaatatttagtttatggataaggggagattattatattgtattaagagaaaaatagttttatatatttgtagtatattggagaatataagttttatgagagtagaagtttttttgtgtttttagtatataatatgagtttggtataaaggttttttatgattgtttaataaatgattgaatgaatatatatttgttttttatttttttttatttttatgtgaagtagaaggttagatagtgaaatatttaggattttgggttttgaattggattttttatgattcggttatttaatatttttgtgtagttagagtagatttttttatttttttaatttttttttatgaataaaatgttaatattattattaattttatcgggttagaaaaattatatgagataatgtatataaaatattacgtttttttgggatagagtgagtattttttaatgttttgtgttttgagatagggtttcgttttgttatttaagttggagtgtagtggtataattttagtttattatagttttgattttttgggtttaagtaatttttttattttagttttagaagtagttgggattataggtgtgcgttattatgttcggttgattttttttgtattttttgtagagatggggttttattatgttatttaggttggttttaaatttttgaatttaagtgatttgttattttggtttcgtaaagtgttgggattatagatatgagttattatttttggttttaaatgttttttattttggaagattagtttattttgtattggtatgggatgggaggggggggtagtgagggttttgaggagtaaggtaaggattggaaatggttattaagaaattgattaaaggaaagtataaggattggttaagtgtggagggtttaattgagattggaaattatattttagagttaataatggggttatttttagggcgaggagcggtagaaggttatgggagtagtatagatatatttaggggtaggtttgtatgtaaatgttatttagagaagtatagatgtgatcgaataatattattttttaattttgaaatattttgtagttatttttagttagaatttagagaataggtgattttttttttagagttagtgattgatattgaattgtatatagttggagaaattagtttgaaagaattaatgatagaattgaagagaaaatttttgaaatagttaaaaatgatatttaaattaaggtagaaagtgatattaaaaagggtattataaaaattagaaagggtagaaagtttgagatgatgaagattttaatggtaatggtggaaggggttattagttttaagttggaatttttggagatgaggggttattagttttaagttggaatttttggagatgagatatatgatgaaaattgttataatttgaggaataaaggaattttagggtttaagtttttaaagagttattagtatggtattatatttgtgttgaatgatagtagaggaagagatagtaaaaaaagatttttaatttgttaaaaagtaatatgtttttaagaggttgatagacgacggattagtagattatagtttgggaattagatagtagtttgtttttgtgtggttttggggttaagaatagtttgtaatagaggaatatttgtaaatattagtaattatagaatattaattttatattttaattaagtgaaataattttttttgaaaaagtattttatttttattaatagatttgtattataaaaatttttattgttattatttttgttttaaaatttttaaaaaattgtggaaatttgattttcgttttttatgtgagtatttatatagtatttttaattgttgttttttgatataaagtttgaagtatttgttttttgtttatgaggtagaattgagaggtatatgtagatttgagaataggatagtaatatttgatggtagaggagtaaggttattgaatttattgtggagagagacgtggtaaattaaaagttattagtggagtggggagaggtagcgtgtttggaaaagaatgtttttatttaagattagtgtttttatagggtaaagtgatgagaagttaaggttttttaggtaaattttttattagatatgacgtttatttatataagtatataaatataaatgtattggttaatgatatatattttttttaaaatgaatagcgaatatatttatgtgattattatttagattaataaataaaatattatagatatttttttttttttttttttttttttttttttttttgagatagagttttgttttgtggtttaggttggagtgtagtggcgtaatttcggtttattgtaagttttattttttgggtttacgttatttttttgttttagtttttcgagtagttgggattataggcgtttattattacgttcggttaattttttgtatttttagtagagatagggttttatcgtgttagttaggatggtttcgattttttgatttcgtgattcgtttgtttcggttttttaaagtgttgggattataggcgtgagttattgcgtttggcgatatttttaaatttttattttgatttttgttagttattatttatattttttaaaggtaagttgtagtttgatgatttattttgtttgtttttgatttttatataggtggagttaagtatttattattatgtattgttttgtatgatattttttatttagtattgtttgtgagttattatgtttttaggatagtagtagtagtttattgattttttagtgtcgaatgttaatttattatgagtatgttgtggtttgtttttttattttaatattgatagatttggttattataaatagtgtttttgtgtatatttttggaagtgtattttgattatatgtatttatttgttttggatgtttcgaaataattgttggattaaaaagtatgtttggttttgggagataaaaattttataaagtagttgtatttttgttagaagagaataggttttagttagtttatatttatattaatattggtattgttaggattttttaggtttttattgtaatttttagtatgtatttttttatgattaatgacgttgagaatttttttatgtgtttgttggttatttggttgtttttttttgcgaagtgtttattttttagttattttaattgtaaggtttgttttgttttatttatttataggagttttgtatgtaatttggaaggttcgattttgtttttatggttaaatattttttgattatttttatttttattttttgtgggtagtgaaatattgtggtatttttttggatttttttttttttgtaaaattaagtttagtatagaaatttttttttttgttgaagtatttttgttcgtgaatattttgtagaatttttatatattatttagtatattttatgttgttgtgagtttgtgtatatgtatttatttgttttttgtattataggttaaattatgtttttttggattttttgtaaagtaaaagtttgatttgatatggttgatttaaaaatttggtgtaggttgttttagtaatgtggatggagaagtatataggagtttattattgattatttggatgtggagaagtgatagttatatgtgttttataggaaagatggtgtgggttttatttatatatagttttgtttagaaagggtaagagatggtttgtagggatatataaaaaataaggttatgtaaattagaagtaggtgggaatgtttatagtaattttttttattttaaaatttttaggtaagtaaaatatttttacgtttataggttggttgtttgttatattgtttgttattattataagaggggaatgttaatggtttatcgtattttataaagtattttttgaaatatatttttaggtaaattagttttagtattaattagtttatttggggaatttaaatatatttattagaaagttatttttttttgtaga

SEQ ID NO: 306 - DNA, 11812 bp, Artificial Sequence
  chemically treated genomic DNA (Homo sapiens)
tttgtaaaagaagataattttttaatgaatatatttaagttttttaaataaattgattaatattaaaattaatttatttggaaatatattttaagaaatattttataaaatacgataaattattaatattttttttttgtaataatggtaagtaatatggtaagtaattaatttatagacgtaaaagtattttatttatttaaaaattttaaaatgaagagaattattgtagatatttttatttatttttgatttatatgattttattttttatgtgtttttataaattattttttattttttttaggtaaggttgtgtataaataaaatttatattattttttttgtaaagtatatatagttgttatttttttatatttaggtaattagtaataaatttttatatgtttttttatttatattgttgaaataatttgtattaagtttttaagttaattatgttagattaggtttttgttttgtaaaggatttaaaaaagtataatttaatttatagtatagggagtaaatagatatatatatataaatttataataatatgaagtgtattgagtaatatgtaaagattttataaaatatttacggatagaaatgttttagtaaaagaaaagatttttgtattgaatttaattttgtaaggaaagaaaaatttaagaaaatgttataatattttattgtttataaaaaataaagatgaaggtggttaaagggtatttagttatgagagtaaaatcgaattttttaaattatatgtagaatttttataaatgagtaagataagatagattttgtaattgaaatggttaaaagataggtatttcgtaaaagaagataattaaatggttaatagatatatgaaaaggtttttaacgttattaattataaggaaatgtatattaaaaattataataaaaatttaaaaaattttgataatattagtgttggtgtggatgtagattaattggaatttatttttttttggtaggaatataattattttgtaagatttttattttttaaagttaaatatattttttgatttagtaattgtttcgaggtatttaaaataaatgggtgtatatagttaaagtgtatttttaaaaatgtatataggagtattatttgtaatagttaagtttattaatgttaaaatgagaaaataaattatagtatatttataatagattaatattcggtattgaaaaattaatgaattattattgttattttaaaaatatgatgatttataaataatgttgagtgaaagatgttatataaagtagtatatggtggtaaatgtttaattttatttatataaaaattaaaaataggtaaaatgaattattagattatagtttatttttagggggtgtgagtagtgattaataggggttaagatgaaggtttaaggatgtcgttaggcgtagtggtttacgtttgtaattttagtattttgggaggtcgaggtaggcggattacgaggttaggagatcgagattattttggttaatacggtgaaattttgtttttattaaaaatataaaaaattagtcgggcgtggtggtgggcgtttgtagttttagttattcgggaggttgaggtaggagaatgacgtgaatttaggaggtggaatttgtagtgagtcgagattgcgttattgtattttagtttgggttatagagtaagattttgttttaaaaaaaaagaaaaaaaaaaaaaaaaaaaaaaggatgtttgtaatgttttatttattaatttgagtggtggttatataaatgtattcgttatttattttgaaaaaaatatgtattattgattagtatatttatatttgtgtatttgtatgaatgaacgttatatttgataaaaaatttatttaaaaaattttaattttttattattttgttttatagaaatattaattttaaataaaaatatttttttttaagtacgttatttttttttattttattagtaatttttaatttgttacgtttttttttataatagatttaatagttttgtttttttattattaggtgttattgttttgtttttaaatttatatatgttttttaattttgttttataagtagaaagtaaatattttagattttgtattaagaagtaataattgaaaatattatataagtatttatatgaaaaacgagaattaaatttttataattttttaaaaattttgaaatagaaataataatagtaaaagtttttgtaatataggtttattaataagaatagaatgtttttttaagagaaattattttatttaattggggtataaagttaatattttataattgttaatgtttgtaaatgtttttttgttataaattatttttagttttaaaattatataaaaataggttgttatttgatttttaggttatagtttgttgattcgtcgtttattaattttttgaaaatatattattttttaatagattaagaatttttttttgttgtttttttttttgttgttatttaatataaatataatgttatattgatgattttttaaaagtttgagttttaaaatttttttattttttaaattatgataatttttattatgtattttatttttaagaattttaatttaaaattgataattttttatttttaagaattttaatttaaaattgataattttttttattattattattaaaatttttattattttagattttttgttttttttaatttttgtaatattttttttgatgttattttttgttttagtttggatattatttttagttattttaaagattttttttttagttttattattgatttttttaaattaatttttttaattatatataatttagtgttaattattaattttggaaaaaaagttatttattttttaggttttggttaaggatgattataaaatgttttaaaattagggaataatgttattcgattatatttgtgtttttttaaatggtatttatatataagtttatttttaaatatgtttatattatttttatagttttttatcgtttttcgttttgagaatgattttattattagttttaaggtatgatttttaattttagttgggttttttatatttaattaatttttgtatttttttttgattagttttttagtaattatttttagtttttattttattttttaaaatttttattgttttttttttttattttatattaatatagaatgggttagttttttaaaataaaaaatatttagagttaagggtggtggtttatgtttgtaattttagtattttgcgaggttaaggtggtagattatttgagtttaggagtttgagattagtttgggtaatatggtgaaattttatttttataaaaaatataaaaaaaattagtcggatatggtggcgtatatttgtagttttagttatttttggggttgaggtgggagaattgtttgagtttagaaagttagggttgtaatgagttaagattgtgttattgtattttagtttaggtgataaagcgagattttgttttaaaatataaaatattaaggagtatttattttgttttagaagagcgtagtgttttatatgtattattttatgtaatttttttaattcgatgagattggtggtagtattaatattttatttatgagaaaaggttaagagggtaaaagaatttgttttgattgtatagaggtattaaatgatcgagttatgaaaggtttaatttagagtttagggttttaaatattttattatttggttttttgttttatatgaaaataaagaagagtgagaaataagtatgtatttatttaattatttattaaataattataaaaagtttttatgttagatttatattatgtgttgagagtataaggaagtttttgtttttatgaagtttatattttttaatgtattataaatatatgaaattgttttttttttggtgtaatgtaatagtttttttttatttatgagttaaatgttttaagattttttagcggttgttgtttgaaattgtagatagttttaattttatatttattgttttttttttatatatgtatatttatgataaagtttaatttataaattgggaataagagatgaataataataaaatagaataattaagttagtatatatagtgtggatatattggataaaaggatgatttatgttttagttttaagtaagagagcgagatagattttattttattatttagaagggcgaataatttaaaatttacgaattgttaatttttggaattttttatttaatatttttggattatgagtaattggaattgtagaaattgaaattgttaagggggtgtggggggggggggttgttgtatttttatatagtaggattattgattttattttaattattttgtttttaagatttaaagttttatttttttaaagttttttttgtttattgaagataataaaattttaattttgatagtattttattagtatttattttttcgatatttatttttattttatattaaaaatatttaattttaaaggataggtaagttgtttagtggtgagatgtttgggttttattttggattttttagttatatggttttatataattaatttttggacgataagggtttgaattatataggtttacgtatatataatttttttttaataaaagttatattaagtgtgtttgttttttttgattttttatttattttttttattttttttatttttgttatttttgaaatagtaagattaatttttttttttattttttttttttagtttatttaatatgaagataatgaagatttttatgatgatgtatttttatttattaaaaagtaaatgtatttttttttttttataatttaagattattttattttttttagtttattttattgtaataatatagtatagaatatatataatataggattgtttatgtttttagtaagtttttttgttagtattaggatatattaagttttgggggagttaaaatttataacggatttttgattgcgagagtttagcgtttttaatttttgtattgtttaagagttaaatgtatttagtaattgttaattaaatattttagtatttgttttttttttggtgtattatagttattttattaatattttttttaaagaggtgggtattgggtagttttttttattgatttttaattgtttgtagtttatagttttcgtttagttttatgaaaatttaatttatatttatatattttttttttttttttgtgtgttataaaaaaaatgaaattataaagaatataaaaatatataaagtttagttagtttagaagtatttttataagtagttggtaaaggtttttaaaatatagtatttttattagattttttgtttttatttttttagaaaagaaaataatgtagatgcgaatgttttatttaaggtttaaaatataggtgtaaaaagaagaattaaagtaaaaatatattaagagaaagttttatatgataagatatttttggatatttattgaaaatgattttagtcgttatttaacgttaataattttagagttgtttatgtttagaaaaggtgtatatgaatatgaggattatatttgtttaacgagttataatatttggacgttggtttttgggacgtttttgttttattgttttttgttttttgttatataaaatttattttttaaatttagagttttttaagtagatttatattgtagtttgtttttagaaatagaatttatttatttttttgaaaaaattcgaatttttttattattgtaaattattttgtattattaaaatgtattaattttttaataaatttacggtataattaatgttaatttttttttagttaaaatttttaagtttaataaaatttttaggattgatatatgttttaaaatgaagttttagaattatatatttatttatgatattttgagtagataattgaatattaacgattaatttaaattatatgaagttagtataatatatttattggaaaatatatttaaagattggagggattttttttgggggggggggcgggggagcgtcgtttttatttgacgaaatatgttgttttagaaagttttatttaattaagataagaaaacgtaaagaatttataattttatggaaattaaagcgttagatatttattttaagtgtaagagaattattttaaaagattcgatatgtaaaaatttatagttaagtttaggttttttatagtttttaaaagaaaaattaaaagttttaatagtattttaggttgtttttataagttagtttgtgaagttttaacgttttttagcgaaattagcgaatcgttaattttcgagaagaaatgatgcgaaaatttttttcgtattgatattttagtaagtgaaagagatttttttttttttttcgtaattttttttttttttattgtcgaatagtgcggtgttttttaattgagacgacgttaaattattagaagatttttagtgttcgtttaggaattaaattcgcgatcgtttcgtacgtgttaggtttaggattatagatattatttttcggttttgtttagtattttattcgtttttacgttttttttgcgtttaaagatttttttattttttttatagagagaaatttaagaagcggaaagattagatgtcgatttaaaaagtgcgcgatgcgagtagttaagtcgtatttcgttattttgttaaagaaaagggagtttgtgtttattaaaattttattggtagcgtcgataaacgaatagatagattttgtattgcgtatgtgttgtggtaaaattggtttaaagaaaggggcggggtttattttggagagtagaggataacgacgtatgcgcgcgggttgttttattttttgcgttagggcgcgagtgacggaaatagatttttttatttgtaggtttgtcggtattttttttttaatgttggttttcgattattagttagtggtttgtagtttatttcgttaataattattgaaagtttagaattgattgttgaggtaatgtgattgtattgggatgcggtaaaggataatatgaggaggtttttgttttttaggaagttatatatagggaagaatatttaggtttttttatttggtatacgttaattattttgtaagcgattgttaaagtgagggtgggtttttagatagaaaataagtgaaataaattttagatatagtaagagttataatttggtggagatggttgggttggatttatttaattaggatggttagagaaaatttagataggaattaaggaaattagagaaaagtttgatagagtaataagttagttgagagttgtggtaagagaaggaggtgattaaaattagagttagggtaaaaatatgattgttggaacgtatagtaaaaataatgattatgagataggaagggatttagtgtgtgcgttttaaaaattgaatggtttgtgtgtattggggagtaaggttaaagagtttgataagggttaggttatgattatggtaaggaatatggggtttttttttaagtattttgtagtgttttttgttagttattttttattttttaggtttttttattttgaagagttttagggattttggattttttttttatttagattaatgttttaaatggtaacgttttttgtatgtagtttgtatattgataatttttaaattatagtcgtaaaattgattattagttttagatttaaatgtatttagtattttaacgtgagtttgttttaaattaagtttttttatgtagtttattaaatttgttttagttgtattttttatttcggtgaatggttattttatttgtatagttttttagatttaaaattttagagttattattgatttttttttttatattgtgtatgaaatttattaaaaaattttttaattttaatttttacggtatatttagatttaattagtttatattattttcgaagttttaattttagtgtatattattattattttttgttttgattttgggaattatttcgttattaattattttgtttttttttttttttttgtgttttattttttataaagtagttagagtgaagttttaaaagttaaattatgtttaaaggtttttaaggtttgttattttatttagagtaaaagatgtagtaggtattataagtgatttaataagttagtagattatttggatttattatttttttgattttattttttaaatgttttttttttgtttatttgattttaattatatagatttttttttagttttttagttatttttattttgtttttattttgttttgttatatttgttattatttttattcggaatgttttttttttagttatttgtatagttttttttttgttttttttatattttgtttaaatgttatttgtttaatgagattttttttgattagtttatttaaaaatgtaattaatttgtttataagaattttttattttgtttttttgttttattttttttgttttatagtattttatttattttatttatttttggttttttttgattattgtattaattttataagattagggattttgttattattttaaatataataattgtttttcgaaagtttaaataatgtttagtatatagttggtatttaataaatatttttgaatgtgtatatgagtaaaagaaggaggtaggtttttggagagtgatgtaaagtttatttatttatttattttgagacggaattttttttcgttgttaggttggagtgtagtggtgcgatttcgcgttattgtaatttttgtttgtcgggtttacgcgatttttttgttttagatttttgagtagttgggattataggtacgtgtttagttaatttttgtatttttagtatagacggggttttattatgttggttaggatagttttgattttttgattttatgattcgttcgttttaattttttaaagtgttaggattataggtgtgagttattgtatttggtttgatgtaaagatttttagttgaaatgtattttaattattgtgtggtaaatgaattgtgaaggggtaggaatgaaggtagtaggattagtttgatgtttttagattgggcgagggttaatggtggtatagataagtatatttatataagtagcgagaagagataagatttaagatggattttggtggtagaattaataagatttgtttttggattggatatgatggataaggaagagtaaaaattaaaatgatttttagaaatattatttagttaaaaaggaggggattagttatatatataataattttaatgaatttttagggaattacgttgagtgaataaaagttattttttagtcgggcgcggtggtttatgtttgaaattttagtattttgggaggttaaggtaggtggattgtttgaggttaggagatcgagtttagtttggttaatatggtgaaatttcgtttgtattaaaaatataaaaaaattaatagggtatgttggcgtgtatttgtaattttaggtatttaggaggttgaggtaggggaattgtttgagttagggaggtggaggttgtagtgagttgagattttattattgtattttagtttgggtaataaagtaagattttattttaaaaaaaaaaagttagtttttaaatgttatatattaaattattttatttatataatatttttatatgataaaattatggaaatggaaattagattagtaattgttaagggttaaggaggatgtgggggtgggagggaagtaagggtggttataaaaggtaatagtagggatttttgtggtaatggaatgtttaggattttaattatgttattattttagttgtgttattgtattgtaatttatgttttgtttttaatagttttattgagataaaatttatatattaaatagtttatttatttaaagtatatagttttatagatatatatagataagtgtagttattattatagttaattgtagaatatttttattattttaaaaagaagttttgtattttttagttaagggtaatttttttatttttttattttttttattttagttttaaataattattttttatcggtataggtttttttatttaagatgtttatatgaatggaatcgtataatatgtggtttttggtgttttattttttttattttatatgatgattttaagatttatttaagttgtagtaggtattagtattttatttttttttatggttattgtatttatataatattttattgtagttatagattatttattgtttacgtatttatttgtaaatggaaatttatatagtttttattttttggttattaaggataatgttattatagtaattttagtattttgggaggttgaggtgggggtattatttgaatttaggagtttaagattagtttggttaatatggtaaaattttatttttattaaaaatataaaaattagttaggcgtagtggtatgcgtttataattttagttatttgggaggttgaggtaggagaattatttgaattcgggaggtggaggttgtagtgagttgagatcgtattattgtattttagtttgggtgatagagcgagattttgttttaaaataataataataataataataataataatagtaatgttattataaatattcgtgtataagtatttttgtggatatgtgtttttaatttgtttaggtatatgtataggagtggaattgttgggttatatttttgtttaatagtttgaggatgtgttagattgtattatagttttgtaagatgttattattagggtgaattgggtagagagtaaataggattttttttgtgtttataagttgattttataattgtatgtgaattttttattttaaaattaagaagtttatttttgtattttgggtttaagaaattgagttttttttggtgattagtatatggggtagaatggtaaaggaatatgtatgggtatttaaataaggagttttgttttaggtaaaatgagatttttattaaatatttgagtggttatgtttagtaagtaaatggagatattattttggatgagttgatatagttatcgattgtttataatgtatgttattttgtatgtttttaatgatgtggaagtattatatgatttttattattatgttatttatagtattgttgggaaagtaaggatgaatgtttatgaagtagagaatatatgttagtataagttgttaaattgtggggtatagtttgtgtggtttttaagagttgagaaataatagttgtaatttgaagttttttgaaattttaggaagttgtaataaaatataaataggaaaagaggtagaagtgaggtagagtataggaagtaaggaagtaggtagtagtatgaaaattttttaaaaaggaatagagagtatttttgagaagtagagagaaataagatgtaattttatttgataaatattttgaatttttattatatgtaaggtattaagttaggtgttattgggaatatataattaataagtgttagttcgtggttataggagtttttagttttatagatgataattattaatttatttaatttaaattaaatgtttataatatgttaggtattattttaggtttagggaatatagaaggaaagaaaataatattttttaaagaaaatttata

SEQ ID NO: 307 - DNA, 9207 bp, Artificial Sequence
  chemically treated genomic DNA (Homo sapiens)
aagaattaagttaagtgtttttttacgtttttaagaggtatttttttgttagaattggggtaatttttatggcgtttagtgagaattttttagaagatgagggttggtgttttatgttttaagagttaagagtggaggtgttggtttttttttggttttttaatttgtattaaaggggtatgttttaggtggtgattattggaatttagaggtaaaggtagtatttgtttggagtagagaatacgaggtgaggcgggatgattttatattatagttatagataagaggtattaatagtttagtcggtttgaaagagatatatttaaagttataaatgggaagacgtgggtggaaagttttgtagtaattggaaagttattttattaaagacgtgttataatttaaaaatattttaatttttgaatgatttttttatatatttgtttaagtcggtgatattatttagttttaatattttaatttaagttttattttgttattaaaatgtgagttaagttaatttaattatttgttagattgattggtataggaatgattaatttttggtttgtgtgaagattagtggtttagttttttagttagtaaaatatataagtcgatgtattgaggattatttagttttatgtatattgttggaattattttgtgatttagataaaaatatataattataaaattatatatttgtatacgtttgatttagtttagatatatttatttagggattattagttttatagaatataacgggtcgttattattattttggttgtttagatttgtttaaagtacgttattgtgtagtttgatattatggtggatttttaagcggtttatatttttttagagtattgttttataagggaaaatgattgtgttagggtggtagtgtgttggacgagggggtaggaggtttggagtgtggttttagttttgttaggaaataggtatttgattttgggtaaggaattgattttttttgggttttagtttttgtattttataaattagagttggtttgagttattagttttttgaagttttttttagttttaaaatttaatgttttattttttcgtttttgattattaaaggtaagaaaaatatagttaaagatattatggtttttattgatagtattgggattgattttatattttgttgttaattaaaagtgttagtgtagggtagtagtgattagcgatgttcgtaggagattaagatttttagggttaggggatttgttatttatttattatatatttaatgatacgttagatattgttttaagtgtttgggagatattaatagagggaggtttcgaggggtttataggtggtttgttagggaatggttgggcgggatttgattttaggtagtttgggtttataggttgttttttagaggtgaagacggtagttttagttgggtaattatgtttttatgtttatagggagtgtaagggataaaggaggttgataaggagtagaaggaattagaaaggagtattagtaacgtttttgattattagtagaatattttatttgttattttaaggaattttatagaaaagattagatattggttaatttttgtataatttgggtttattttgatggagtaggaggtagttttacggttttatatttgtttaggatttttggtagttgggttagtttgtaaatgggtaaggttggttggattcggaggtgggcggaagtgtgggttaagtttattaagtttttgattttaatatatattagtgaaatagttattattgttagatattttagtaggttagatgtaggcggtagtttatatatgaggaaatgatttttatttttaggtttatttttttttttttttattttttattaaagttttattgtgtatgtgattttaattgaattgtgtattttatttttattttttgagggcgggaattaattaagttttaattatatttgtttttttagtatttgattttgtgtttgttaagtgaatgaatgatgtatttcggattaaatgacgtttgtttaatttgtaattggaaattattataaattgtttgttgattattgatttggattttaaggtaaatatagatatgtttttaaggagacgtttttgtgtgtgtttttttttaaaggatgatttcgtaagttagttaattattttttataattatgtttggattttaaagaattttttttttgtattttattttttagatattttatgttcgtaatatatatattttattgtaatatttttttttttttttttttttgtgaatgttttttttttttaaggggaaagtgttaatattgtttataatttagtttgttatagcgtatttgattattttattttgtgtattttttgatttttaatttttttttaatattttcgatttttgatttttaagtataagggttatatttttatttattaggtttaatttattgtaaagtttattgttttttgtgaatcgtacgataatagttaatgaataattattggttttagttagattgttttttaattttgttgagtaattggtaagttaattagtattaaggataaaaatgtaaggaattttgatattgttttagaattaggataagttattttattatgaatatgtgattgttttcgtgtagaggtggattagttatagggtaggatttagggtaagggggttgtttggggtagttttagattttttggaaggggaaatagggaggattagggatttgggtgggaggtaggagtttaggtttacgatgattttagtatataggtttagttttttttttttatagtttttttgtcgttttagttttgttatttggtttttcggtcgggattttttttttaaggtttttatatatttaaattcgcgaggggtaggattttttttttttttttcgtgtatatgatagtttttttaaaatgttttttataaaattttttttgaggagagtttggaaaaagatttttaatagttagattattttgagtttttttttattatgtatttaatattttaatatattttgtatatttggttttatgttatttgttatagttttaaggacgtaggttttataattattttttattttgtagaggaggtttaaggttagtgagtagaggaaggttttattgtcgggaatcggtggtttttaaatttttgtgttttttttttgatatttttttgtttatatatgttggaaatagtttagtatgagtaaagtattattttttagtttttagtttgtgttagttttgtaaagaggaaatatggttttatttagggagtttattagcgatttagggagttttggagtatttggtatttagtatttatgaatacgagggtaggtatggtgggataaggtagtttgtttggggtaagtgagtttcgggaagtagttgagttttggggagtagttgtttatatttagttttttagggttgtgtaagtagtttgagggagaaagattttatattagttgaaattgtagtttagatgagttagtattttttgttacggttttttaaaaaaatagtaatatatttatgtttttatggtaatttattatggatttgtattttatttatggaatttttttttgatttatttgtgttttttaatttgggtttgaatatatattgagaagttattagaattaatttagtttttaagaaataattattttttttatacgtgattgttttagtcgtatagattttgattgtgatttatgttacggtgatattcggagattttcggggatttagaaatattaaggtgtatcgatattttaattattcggataattttagatttagagttattatggaaatttagaattttgagttatagagaagttgggttattttttttttttttcggtggtgtcgtagtttttgagatgtgagtagtttttagtttcgtggtttcgtttaagttggggttttttattttatttataattttaggaatttaaatttttttgtaaaatattgagtatgtgatttgagtttaaatagttatggatttaagtattttttgataaaaacggaaattatagtgtagggggtggttttgattagggtttcggagttagataaatttaggtttttattttgaattttttattaatttgacgtggtaggttatttattttaaggtttagtttttatttgtgtaaagtgggagtcgtaagtttttcgagagtgacgatgatgtgcgtggagtgtttagtttagattgaagcgcggttaaggcgggtcgttatttgggtatcgtttagttttagagggcgttattttcgcggagtttgcgggatcggggtttttcgggagtagcgcgattagtattacgattcggggatatagttagggttcggtttttataggaagcgttttatttggagtttttttgtgatagaatgattattagttttaagtttatttagaggtttaagaatggggtcggtttaattttagggttttattatttaagttcggttgtttttcggtgttattagtattattgtttcgtcgttgcggaattttaaaggtaggtttggcgttagggttttggttttagagaggacgtcgagcgttttacggaaagttttcgttcggtttttagggcgtatattcgcgcgtacgtggggtcgaggttttgttttcggggttttagggttagtcggcgagggatttagtcgagtgatagtaggaggcggagggaaggttgggtcggaaggtgttagtttcgtttcgcgttttttcgtcgttttcgtttttttttttttttttttcgtgcgttttttttttttttttttcgtttttttaatttttttgttgttttttttttttttttttcgtttttttttattttgtttatttttttttttttttttttttttttttttttttttttttttttttttttttttttttttttcgttttttttttttttttttattcggtcgttttttttttttttttttttttttttttttttttcgtttttgaagagcgcgtcgcgtgggggacggttcggttattttttttagagattgacgagtgcggtgtcgttttagtttagagttttcggagtcgttcggttagcgttcggtttttttgatcgtttttggtcggcgttttcgttttcgttcggcgcgtatcgagtagtcgcgggcgtcgagtagttatcgtttcgattaagcgtcggttttgttcgtagcggtagggtaagagttgggttcgtagagagcgttcggcgcgcggttttagttttatggagggttattcggggtttgggcgggggtcgcggggggtattgatacgtagatttcggggcgttgtcgggggtgtaggtgggggtggcggttgttgcgaggattttaggggcgcgcgtttgagtttcgcgtcggttcgtttttcggttatggagtggttttcggggttggcggggtcggtcggggggtttttgcgtgttagggtcgttgttttcggggtcgtttagcggcgggcgcggttagggcgcgttggtttgtttcgttcgtttttgtttttaaaaggaaacgtaggtttggtagggggttttgtttagtggatgtttcggcgaatatgatttcgcgaacgggagtgggggtataggagagcgtgttcgaggtggtttggcgtttcggttttgagggtgattttttggagcggcgtcgggttcggaggatttggggcgtttaagatatttgaaggttgcggtatcgcgggaatttgcggggcgcggggtgttatggttatttgttcgtcgcgtttagggttcgggttggggatttttcggtcgtgcgaggagagcgtggggaatttgtcggaaatgagatttggttgcgttgggttgtttttattttttcgtttttatagtatttgaatgaagaggtaattgagtgtttgtttgtgtgtgtttgggttgcgtgtgtgttattttattttattttttacggtaggagattttttatgttagtttgtatataattttagggtagtttaaaatagtagttgacgcgttagttatttagaaagtaaagaaatgagtagttttttttggagataggagtaatttattttaattcgttagtaagagattatatttgttttatataatggaagcgtttgtgcgttatttgtttgtttatattattattaattagagagataaatttttacgttaagttttattaaaattttgagtagtagcgtagtatagtaaatgttagtatcgattattcgtagggaaatgtttagatatttatttttgggattagttatttatttttttaaattgatcgtttttaaagcgaaaaaagtaaattatttttaaatgtgtgttataaggttgtgttgttttttttttttgtttgtttttaaatttatttaaataattttatataagtgattatttgttttaataagggtattgttgttaggtaaattttttttgtttttaaatgtaattatttttagttgttatatttttgttttttatttttttttttttttttttttggtttaaaagtagcgatttattagtaatattaaatttgaaattgatttatgtggaaaaatttggtttgtttgttatttaataagttttgttgagtaaaataagtaagtttaaatttgattagttgtgtgtttgtttgaaattatttagtagagtattttaattttgtatggtttttataaaatttattaaaagttggataataaaagaattttattttgtagttagtaattatagttttttatgtgggagtggtaggttgtttttttttttggtatttgtatataaaagttggggagagtttttttattgttttttatatttattttttgtttattttagagaagttgaaaaatagaattaagttagtaagtagtttgtaagtttaaggaagaaaaagagttgatttattcggttttggatggataattggtaatatttaagatgtttatgattttggttttttgtttgaggtttgtttatttttttaattagtagttattaggatttattttatgtagagaaatgatataaagttttagaggaaggagtattttatattggaaggagtagtgagaagggtttgatttgataatattaggatgggtgggaagggtttattttttattatttatgttttttcggtatagaggattgtgtggaggatttaggatttaggattatatttaattggggtttgatttttattttgttttgcggtggtttttttggtagttatgtggattttgggtagattgtttatgttgttgggttttcgttgttttattgtatgacgtttgttttttagggatgtaggaagatttaattaggtaggagtggatggttttttagtacggggtttagtttttagtaattaggtattttggtaatggtagttattaataggagagattattgattgttgagtgaatataagtggtataatttattaagtggagattttgagtgaatgtggttattttggatttaagattgttgtttttttttgtttttttataggattattatttattgttagtgttgattagtttttgttggttattatgattattatttgtatttcgagtgttttaatagaattttttgatgtttttggttttatttgttgttttttagttaagaggggtgtgtgtgtatgtgtgtgtgtgtgtgtgtgtgtgtgttgggtgtgtgttgggtagtagggtttttggaaggtttggtttagttataatgttgattataaagagaaaataagaaaataaatgtaaattaaatagttcggtgagtttttgttatttcgttatatttagtaagttttattagttgaatgttgtttgaattatttaaaaagtttttagttgtaaataggtaagagtatttagtggaggttatggagttaggtttagagttttgttattagtttttagttttatagttatgaatttgggagggtaaggaattattttagaggtgaaggttatttatcggtgttaatttaaggtttttgaaaatgagttttagttattttattatttaagtattttttttattgatatgtaatttatttggttgaataattatattttagagttttaaataaatttttagtttattatgttattgtttaattataagttttattgtaatagttatgttaaaaataataaagtcggtgaaattgattttagtgtattttaaattaatttaatatattcgaaatattatgtatgtataaaaattattgagttttttttttttttttattaagtttttgagagttagtgtgtatgtgtggatttgtattagttattggttgagagttttgtagttatatatggtaagtgggtattatattgtttagtttaggtttagtagaagattaagatttagttagaggaagtaaggtagattcgtgtttggaattagttttttttgaagaagtgtatagttaagtaatatataaagtagaaatattttgagttttgtatttaaagtaggaagatttgggattatgtaagggggtttggtttttagttttttttttgattttttttttgggtgtgtgtttttttatagtttggagagtggaagggaagagagggggttttttggattttttttttgtttttagaaatgatttttgtagttgttttgaagtttttaggttaagttgattgtgtttagagtagataggaggcggtttattgttttattgtatttatttaagtatttatttaagttggttatggaaatgtgaatgaaaagtttgatttaggtttttttgttttgttaatttagtaaggaggttttgattagttagttagtaagtgattttttttgtgatatttaagtggaatttagtgaggaattagtattattatttaattattgaaatagtatattttattgtgatattgagaaatgttttttttttgagatttttgggaggatagttatttaaataagaattttttgtatttatttttgaattatttgttagttgtagaatttagttaggattaagttttgatgttattaatgatgagtttagtgtatttaattttttgtttttttgatttttttttttttttttttaaga

SEQ ID NO: 308 - DNA, 9207 bp, Artificial Sequence
  chemically treated genomic DNA (Homo sapiens)
ttttaaaaaagaaaaaaaaaaagttaaagaggtaaaagattaagtatattaaatttattattggtggtattaagatttgattttggttgagttttatagttaataggtaatttaaaagtgaatgtagggaatttttgtttaaatggttgtttttttaaaggttttaagaggaaagtattttttagtattataatgggatatgttgttttagtgattgaataataatgttgattttttattgaattttatttagatgttatagaaaaagttatttgttggttggttggttagagtttttttgttgggttagtagggtaagagggtttgggttaggttttttatttatatttttatggttagtttaggtgagtgtttgggtgggtatagtggggtagtgggtcgttttttgtttgttttggatataattagtttaatttgagagttttaggatagttgtaggggttatttttagagataggaaaggagtttaggaagttttttttttttttttttattttttaggttgtaagaaagtatatatttagggaagggattaaagggagaattgaagattaaatttttttatatggttttagatttttttgttttgaatatagagtttaaaatatttttgttttgtgtgttgtttggttgtgtatttttttaagaggaattgattttaagtacggatttgttttattttttttgattgagttttaattttttattaggtttgggttaagtaatatggtatttatttgttatgtgtggttatagagtttttaattagtggttagtataaatttatatatatatattagtttttaaagatttagtggaaaaaagaaaaaagtttaataatttttatatatatataatatttcgaatatattaggttaatttgaaatatattgaaattaattttatcggttttattgtttttaatatggttattataatgaggtttgtaattggataatgatataataggttgaaaatttatttggagttttaaaatgtaattgtttagttaggtaagttatatattagtaagaaagatatttagataatagagtaattaaaatttatttttagagattttgggttagtatcgatgaatggtttttatttttagggtgattttttgtttttttaggtttatggttatggaattgaaggttggtggtaaagttttaagtttagttttatggtttttattgggtgtttttatttgtttataattgagaattttttaagtaatttagataatatttaattgatagaatttattggatgtggcgaaataataaaggtttatcgaattatttaatttgtatttatttttttgttttttttttatgattaatattatggttaaattagattttttaagaattttgttatttaatatatatttaatatatatatatatatatatatatatatatatatatattttttttggttaaaaggtagtaggtgaggttagaggtattagaaaattttgttaaaatattcggagtgtaggtaatgattatggtagttaataaaggttggttagtattggtaataaataatagttttatgagaggatagagaggggtagtagttttgggtttaaagtggttatatttatttagaatttttatttggtggattatgttatttatatttatttaataattaatagttttttttattgatggttgttattgttagaatgtttagttattaagagttaagtttcgtgttgggggattatttatttttatttaattgaatttttttgtatttttgagaggtagacgttatatagtgaagtaacggaggtttagtaatatggataatttgtttaggatttatatagttattagaggggttatcgtagggtaaagtggagattaaattttagttgagtatggttttaaattttgagttttttatatagttttttgtgtcgggagaatatgaatgatgaggaatggattttttttatttattttgatattattagattaggttttttttattattttttttaatgtgaaatgtttttttttttagagttttatgttatttttttgtatgaaataagttttggtagttgttgattaaagaaataaataagttttaaatagaaggttaaaattatagatattttgggtgttgttagttatttatttagagtcggatgggttagtttttttttttttttaggtttgtagattgtttgttgatttgattttgttttttagtttttttgagatggatagagaatgaatgtggaaggtagtggaaaagttttttttagtttttgtgtataaatattaggagaaaaggtagtttattatttttatataaagagttgtaattattagttatagaatagaatttttttgttgtttagtttttaatgagttttgtaaaaattatgtagaattaaagtgttttattaaatggttttaggtagatatataattaattaaatttaagtttgtttattttatttaatagggtttgttagatggtagataagttaagtttttttatataaattaattttaagtttggtgttgttgatggatcgttgtttttaaattaaaaaaaaaaaaaaaaaaggataaagagtagaaatgtaatagttgagaatggttatatttaaaaataaggagaatttgtttgataatagtatttttattggaataagtaattatttatgtaagattatttagataaatttgaaaataaataaaaaaaagaaataatataattttgtaatatatatttgaaggtagtttgtttttttcgttttgaaagcgattagtttagagagatgaatgattaattttagaaatgagtatttgagtatttttttgcggatggtcggtgttaatatttattgtgttgcgttattatttagaattttaataaagtttaacgtggagatttatttttttgattggtggtggtgtgggtaggtagataacgtataggcgtttttattgtatggaataaatataattttttattggcgaattaaaataaattatttttgtttttaaaggggattgtttatttttttattttttaaataattagcgcgttaattattgttttaggttattttgaaattgtgtataggttaatataaaaggttttttgtcgtaaaaaataaaataggataatatatacgtaatttaaatatatataagtaaatatttagttatttttttatttaaatgttgtaggaacgagaaaataaaggtagtttagcgtaattagattttattttcgataggttttttacgtttttttcgtacgatcgaggggtttttagttcgggttttggacgcggcgagtaggtgattatggtatttcgcgtttcgtaggttttcgcggtgtcgtagtttttaggtgttttgggcgttttagatttttcgggttcggcgtcgttttaggaagttatttttaaagtcggggcgttaggttatttcggatacgtttttttgtgtttttattttcgttcgcgaaattatgttcgtcgggatatttattgggtaggattttttattaggtttgcgtttttttttaaaaataaaagcgagcgaaataagttagcgcgttttggtcgcgttcgtcgttaggcgatttcgaagatagcggttttagtacgtaggaatttttcggtcgatttcgttagtttcggaggttattttataatcggaaaacgagtcggcgcggaatttagacgcgcgtttttagagttttcgtagtagtcgttatttttatttgtattttcggtagcgtttcgagatttgcgtgttagtgtttttcgcgattttcgtttaggtttcgggtgattttttatgggattggagtcgcgcgtcgggcgttttttgcgggtttagtttttattttgtcgttgcgggtagggtcggcgtttggtcgggacggtggttgttcggcgttcgcggttgttcggtgcgcgtcgggcgagggcgagggcgtcggttagagacgattagggaggtcggacgttggtcgggcggtttcgggagttttgagttggagcgatatcgtattcgttagtttttggaggaagtaatcgggtcgttttttacgcggcgcgttttttaggagcgggaggaggagggaggagggaggaggaaggagggacggtcgagtggaggggaggggaggaaacgagggaggagagaagagagaggggagggaaggggaggagagagaagaggaggggaagggaggtaggtaggatggggagaagcgggaggagagggaagggggtagtaggagggttgggggagcggagggagaggagagggaacgtacgaggggagagaagaggagggcggaggcggcgagggagcgcggggcggggttgatatttttcggtttaatttttttttcgttttttgttgttattcggttgggtttttcgtcggttggttttgaggtttcgggagtagggtttcggttttacgtgcgcgcgagtgtgcgttttgggagtcgggcggagatttttcgtggagcgttcggcgttttttttggggttaaggttttaacgttaaatttgtttttggaatttcgtagcgacggagtagtggtgttggtggtatcgaagggtagtcgggtttgggtaataaggttttgaaattgagtcgattttatttttgaatttttgaatgggtttaggattaatgattattttattataaaaaggttttaaatgaggcgttttttgtagaaatcgggttttggttgtgttttcgagtcgtggtgttgatcgcgttgttttcgggaagtttcgatttcgtaggtttcgcgggagtggcgttttttggagttgagcggtgtttagatagcgattcgttttggtcgcgttttaatttgggttgggtattttacgtatattatcgttattttcggaggatttgcggtttttattttatataggtgggaattgaattttaggatgaataatttgttacgttagattgatgagaaatttaaggtggaaatttgagtttatttgatttcgaaattttggttaaaattattttttatattgtggttttcgtttttattagaaggtgtttgagtttatggttgtttggatttaggttatatgtttaatattttgtaggaaagtttagatttttgaagttgtggatgaaataggaaattttagtttaggcgaggttacggggttgaaagttgtttatattttaagaattgcggtattatcgggaagggagaggaatggtttagtttttttgtgatttagggttttaggtttttatggtgattttaggtttagagttattcggataattgagatatcggtgtattttaatgtttttgggttttcgaaggttttcgggtattatcgtggtatgagttatagttagaatttatacggttgaaataattacgtataggggaagtgattattttttggagattgaattgattttgatggttttttagtgtatatttaggtttagattagagaatatagataggttaagaaagagttttataaatggaatatagatttatagtaagttattatggagatatgagtatgttattatttttttaaaaaatcgtagtagaaaatattgatttatttgggttgtagttttagttaatatagggttttttttttttaggttatttgtatagttttgagaagttgggtatagatagttgttttttaaagtttagttatttttcgaagtttatttgttttaagtagattgttttgttttattatgtttgttttcgtgtttatgggtgttgagtgttaggtgttttagggttttttgagtcgttgatgggttttttgagtggagttatattttttttttgtagggttggtataggttgggggttaggaggtggtgttttgtttatgttgggttgtttttaatatatatgagtagaaagatattaaaagaggagtataggagtttgaagattatcggttttcgatagtggaatttttttttgtttattaattttgggttttttttatagaataagggatgattatggaatttacgtttttaagattatggtaaatgatatagaattaaatgtgtagaatatgttagagtgttgagtatatggtagagaaggatttaaaatgatttagttattaagaatttttttttaagttttttttagggaggattttatagaaaatattttgaaaaaattattatatatacgaaaaaaaaaaaaaaagttttgtttttcgcgggtttaaatgtgtgaaagttttgggaaagggatttcggtcggaagattaaatggtagagttaagacggtagggaggttgtgggaagaggaagttgggtttgtgtgttggggttatcgtaagtttaagtttttgttttttatttaggtttttggttttttttatttttttttttaaagagtttgaggttgttttaagtagtttttttgttttgggttttgttttgtagttgatttatttttgtacgagggtagttatatgtttataataaaatggtttattttagttttggggtaatattagggttttttatatttttgtttttaatattagttggtttgttagttatttagtagaattaaaaagtagtttggttgaagttagtgattatttattgattgttatcgtgcgatttatagggaataatgagttttatagtaaattaaatttaataaataaaagtatagtttttgtgtttggagattaaaagtcgagggtgttggaaggaaattaaaagttagaaggtgtatagggtggagtgattagatgcgttatggtagattgagttatgagtaatgttaatattttttttttaagaaagagggatatttatagaagagaggaggaaaagggatattatagtagaatatatgtgttacgaatatgaaatatttagagagtaaaatgtagaaaaagaattttttagaatttagatataattatgagaaatgattagttagtttacgaagttattttttgaaaaaaaatatatataaaaacgtttttttagaaatatgtttgtatttattttaaaatttaaattagtagttaataggtagtttgtggtggtttttagttgtaagttaaatagacgttatttggttcgaagtgtattatttatttatttagtaaatatagagttagatgttgagaagataaatatgattaaggtttagttagttttcgtttttaagaagtaaaagtgaagtgtatagtttagttaaaattatatgtatagtgagattttggtaaggagtggaggaagaaaagaatgaatttagagatagaaattatttttttatgtgtaagttgtcgtttgtatttggtttgttggggtgtttggtagtggtggttattttattgatatatgttggggttaaggatttgataagtttaatttatattttcgtttattttcgaatttaattaattttgtttatttgtaggttggtttagttattaagaattttaggtagatgtggggtcgtggagttgttttttgttttattagggtggatttagattatgtaagagttggttagtgtttagttttttttgtgagattttttggaatggtagatagggtattttgttggtggttaaaaacgttgttaatgtttttttttaattttttttgttttttgttagttttttttgttttttgtattttttgtgggtatgaagatatggttatttagttagggttatcgtttttatttttgaagggtagtttgtgggtttagattgtttggggttaaatttcgtttagttattttttagtaggttatttgtgggtttttcggggtttttttttgttaatgttttttaagtatttagaatagtgtttggcgtgttattaagtgtgtgataaataagtagtaggttttttggttttggaagttttggttttttgcgggtatcgttgattattgttgttttgtattggtatttttggttgataataaggtataaaattaattttagtgttgttaatgggaattatggtgtttttgattatgttttttttgtttttggtggttagaaacgagaaaatgaaatattggattttaaaattggaaaaaattttagagagttgatggtttagattaattttggtttgtaagatgtagaaattgagatttagggaggattaattttttgtttagggttaaatgtttattttttggtaaagttggggttatattttaggttttttgttttttcgtttagtatattgttattttgatatagttatttttttttataaggtagtattttgggagggtataaatcgtttgaaaatttattatgatattaaattgtatagtgacgtgttttaggtaagtttgaataattaaaatagtaatagcgattcgttgtattttgtaaaattgataatttttaaataaatgtgtttgaattgagttagacgtgtatagatatatgattttatagttgtgtgtttttgtttgaattataaaatgattttaatagtatgtatggaattgaataatttttagtgtatcggtttatgtattttgttaattagaaaattgaattattagtttttatataaattaagagttagttatttttgtgttagttagtttagtaaatgattaagttagtttaatttatattttggtgataaaataaaatttggattaaagtgttaaggttgaataatgttatcgatttaagtaggtgtataaagaaattatttagaagttggaatatttttaagttataatacgtttttggtggaatggttttttaattgttgtaagattttttatttacgtttttttatttatgattttaagtgtgttttttttagatcgattgagttattagtattttttatttatggttgtggtgtagagttatttcgttttatttcgtgttttttgttttaggtaaatgttgtttttatttttaaattttagtggttattatttgggatatgtttttttggtgtaggttgaagaattagaggagggttagtatttttatttttagtttttaaggtataggatattagtttttattttttggaagatttttattgaacgttatgggagttgttttagttttagtaaggaaatattttttaaaagcgtaaagaaatatttggtttaattttt

SEQ ID NO: 309 - DNA, 8996 bp, Artificial Sequence
  chemically treated genomic DNA (Homo sapiens)
atattataaaaatttaaaaagtaatgtgagtggatttatttttatttaaaaaataatatattttgtaaaagtgataattttagtaataatatattattgttttaataattttgtattattttgggtatttataattggttttcggtttatttttaaatttacgtattgtttttgtttttaatttttaaaatataattaaaaatatttgaattcggaatatttacgttttaagattttttttttatttttgtattttaaagaaatgagtattttatataaaagtaaatatcgagagataatcgttgaatatgatatattatttttttaagtaaataattatttttttaataattttttcgtttttaaattttgtgaagttaagcgtaaattatgtaaagtttattagtaatgataaaaatagcgtgttaattggggtaggggtagtaagaaaataatagatttatatataaagtttatttttatttgttgtaattaatcgtaattattttaaagtttttttttatttttatttcgagtattttaataaattagtaagtgtattagtttgagttcgttttaattgaaatatttaattattagaacggttgatagatattataggatattaggtttcgaataattttattaatagatttagatttttaagcggtttgaagttcgtaataataaagaggatttaagattaattaagaaacggtcgttagagatttttttcggttataggtatcggtcggtaaaattcgcggaggcgagagggggaggggatacgcggcggcggaggaggagttgaggaaggaattaggttcgtttttggcggataatcgggtttacgagtagttaaacggtaggggggatttaaataggggagaagggtgaatattttaattcggttttgaaatagggagttttgggttatttcggaaaaggcgaagtttttcgagggaaaaggaagggagcggttgggggggcggttggggggggttcggaaaatggattttaggtttaggcggggttttagcggggtttgagtcggggaacgattgcgttttcgaagaaaggtgttaaagaaggttaggtgagggtttaacggttcgttgggagtagaagaatttgggaggcgtttatttggaaagtttttgttgaatttttcggaatttattgattacgaaagatttaaaaatttgttcgatgttggtcgttatggcgttcgtttcgtttttttaattttttttcgttagttttttaggtttttagtatgtttcgggaggaggcgtacgggttaattcggtttttcgtttttttgattggttttaaagggaatgttcggttcggttcgttttatcgagggattaattagtgagtacggttttgtttttttttgttgtttttgagcggttggggtagaggtgttgacgtttgcgtcgcgtacgattatgttcgttatgttagtgtttgacgtaggcgttattataggagtcgttttttttgaggcgatcgtgttcgtataagttgttagtttttagtagtgtttgggagttttaataggtttgttaagtgtttgagattaaaggcgaagaggaagaagagtaagaagggtaattcggtgtttaatatacggtttttaggcgtttttaggtggcgttaagtttagtttcgatagggatatgtattcgggagagaattttttagttttcgtttttattggtatgtgagaggaggaattcgttgttgttttgtgttttttttagtgcgttttataattagttttatttttttttttagtaataggtcggatgttttaagcgatcggtatttaaagttcggtgtattttagttttattaggagttaggcgtgttacgagattttttcgcggtagttgtttagttttgattcgtgagcggcgtataattggttaagaatgggtttagtattttggcgttttttttcggcgtttttggaaatattgcgtggtatttcgtattattgttatattataaacgtgttaaggtttgggtgtttcggttggggagtagttaggtagcgtttagggcgggagggaattagattagattttcgtcgcggagatttagggtcgcgcggattaatggggtagggaagtcgtcgtagggcggggtagtgaggggcggtgtcgcgttggtttcgcgtcggtttcggtgggtcgattttcggcgagcgggtaagcgggaattaggtggttattcggtgtcggtgcgtaaatttttttcgtttttatacggagcgcgtttaggttttggtttggggatttaagatcgcgaattgagtgaaattatagaaattgatttgtagaaatttttttgttgtttgtaaatgcggtgggtgggggttggttatgtgttttttatttgttattgttagttggtttttatttgtttttttattttttttgttttttaagatgttaaggtttttttgtgtttttatatatttttaggatataattttaaattggtgtattttttttttatgtattcgttgtttttggtagattatttggttaattttgtagttggtttttattttattttttatattttttgatacggttttatttgtttgttttattttgtttatgttatttattttgaggaatgaggtttaaggttagtgaagttttttaaggtttttttgttagtatggggtagcgtttttatttaggttaaggcgttgtgtgagatttaggagtttaggcgtttttattattgggtagtaaggttatttttagtgatttattagagtaaatagaatttttttatattattgttatatttaaattaaagatgtaatatttgttttagatttaaagatttgtttatttttggtcggatgtgatgtaattttagtatttgggaggttaaggtgggttgattattggaggttaggagttcgagattagtttggttaacgtagtgaaatttcgtcgttattaaaaatataaaaattcgtttggcgtggcggcgtacgttcgtaattttagttatttgggaggttgtgaggtaagagaatcgtttgaattcgggaggcggaggttgtagtgagttgagattatattattgttttttagtttgggcgatagagagagattgtttaaataaataaataaataaataaaataaaaaatttgtttattttagatatatatggtaagtaaaatgtgttttttcgttatattaaagtagttgtttttttcgagattgtaatttaatagggtttttttttttttttttttaaatttttaatgattatcgttttatttgttgagagaatttgaagtaaaattgtttttgttaggttttatttttttttatttgtgtgatttttagtaagttatttatttatttgggtttttttgttttatttgtaaattggtgatagtaatagtattttttttataggatttttttatgataagtattttaaatagtattttgtttaaggttaagtgtttaaaaaaatgttagttttgtatattgttagtttatattttttttaaaatatgtaattttaatattattaaaataagtttttaatttttttttttttgttattagtttgttttgtggtaagtaaatgtaataagttaatatttattattgttgagtgttagattgtatttatttataaatgttattttagttaattttttaggttatattgttgttgtatttatttttttaagttttaggtgttagaattaaagtgaaatgagttggaatttgatttttgttttttttattaatattttagtatattgcgttatttgaattaggagttagtaaattatggtttatatattaaatttttttgttgtttgtttttgtatagtttattaaatatgaatgattgagaaaaagaataggaaataaatgaggtttttgtgatatgtgaaaattttatgaaatttaaattatagtattcgtatataaagttttattgaaagcgagttacgtttatttgttataaatttttgatggttttttgttatttaaagtattgataggtaatagtgatttttgatttattgtttgtttatgggtttattaaatttttttggatattggtatattgatttattttcgtattatttttggttgtttttttgttaaggtggtcgagtcgagtagttttgatagaattatgtggttttttttgtgtaaagtttgtttattttagtttttagtatattttttaatttatgataatttaattatttgtaagattttaaggtttaaaaattgatattttataatatattttgagtttaaaataagatttattttataattaaggtatgatgattattaaatttttttgaagtgaagtttagagaagggagattattatataaggagttgagagttatcgtttgattttttaatttagttttttaggttagtttgttttttttttgaaatattttttttatgtttatgacgatagttatattttttaaattatgaattttagttttttaaaaatgaattattggatgaaaatgttatttgtatgagtataaatgattatttaaattatatttataaatttggattttttttttttttttgagatggttttgttttgttttttaggttagagtgtagtgacgtgattttggtttattgcgatttttttttattaggtttaagtaatttttttgttttggttttttgagtatttgggattataggtattcgttattatgtttggttaatttttgtattttagtagagatgaggttttgttatgttggttaaggttggttttaaatttttgattttaagtgatttatttgtttcggttttttaaaatgttgggggtataggtatgagttattgtgttcgtttttgggtttttaaaatgtgtattttaagatataaattgtggttttttttttgtaggttttatttttttttggaatttttgttttatagatagaataatggtagttcgagtatttataattggtagtggaggaagggaatatacgttggtttggaaatttgtatagttttattatgttaaataagtgttggttgttttaggaaacgtaggtattgtttgttttgaaaagattttaaatatcggtaattatgttttaaagtggggagtaatagttattatttgttattaatggtatgttgttaattatatttgtattttatgttaataaagataggttgggtatagtggttaatgtttgtaattttagtattttgggaggtcgagatatgcggattatgaggttaggagatggagattattttggttaatatggtgaaatttcgtttttattaaaaatataaaaaattagtcgggcgtggtggcgggtgtttgtagttttagttattcgggaggttgaggtaggagaatggtttgaatttagggggtggagtttgtagtaagttgatattatgttattgtattttagtttgggcgatagaatgagattttattttaaaataaaataaaatatagattattatttagggttgagtgttttttttgattttaaaatttatttggtaatttgaatgtttgttaatatgttataaatttaaggtaatttattgtttagaatatggtatttttttattttaaattgttttaaatttgataaaatatatttattggaaaagtagtaagtgtttaatatagattaaaggtattttgttgtgtatttttgtaaatggaaagtttagtattgttattaaatataatttgcggttacgtgtagtggtttacgtttataattttagtattttgggaagttaaggtagaaggattttttgagtttagtagtttgagattagttagggtaatgtagtgagattcgatttttataaaaaaaaaatataaaaattagttaggtatggtggtgtatatttgtagtgttagttatttgggtaatagagtaagatgagaatttgttttataaaataaagtttttaatagttgttattttaatagattttaatttttatttttttttgattttttttttttttttttttttgagatagagttttatttttatttatattggagtgtagtagcgtgattttagtttattgtaatttttggtttttgagttaaagcgatttttttgttttagtttttcgagtagttggtattataggtgtatgtcgttatatttagttaattttttgtttttttagtagagatcgggttttattatgttggttaggttggttttaaatttttgattttaggtgatttgttcgttttagttttttaaagtgttgggattataggtatgagttatcgtgtttagtttttatttttattttttaattggtaaaaatgaaaaaatggttagtttatatattatattaagtttgttagtggttttagaaattttttagtattttaataatatttagaataaaatttaaattttttattatgttttttaaagttttttgtgtagtttgttttttgtttgtttttttagtttgattttttatatttttttttttttttttattatattttatttatgttgttttattaattttttaagtagaagtttgttgttttggattttatatttgtttttattttttattatgattgtttttttattatttagagttttatttaaatgttagtttttttaattatattttttttatagttttttattaaaagtaagtgtttatttttattttatttgtttatgattatgaatgtttgtgtttatttttattttattattgtttgttttttatgttttttttttttattagaatataatttttagtagaatgtaagttttatgagggtaaggaatttgtttgttttgttttgtatggtgtgtatagtgtttagttttttatgtggtatataatatttatggaaagaagagtatggatttaataagttataaattgggagaagatagtggtatgtatataagattaaaaggaataatataaattagtaaatatttttttttttgggattttaattttacgggtgagatatttgtttattagagaattaggatagtttatttgcgattgaggttatataggtaagtttattaaaattttttaagattattatgagattattataagtagttttgtaagattattaaagagattttttttttttgttgttttttgttatattgatatagttgacgttgtttagtttagttgtgtttagaattattaatttatagtgcgtggtattttattttaattatatttaggtagttgttgtagattgaggattttattttttttggatttggattttatatagtagttattagtttatttataattttattttttatagttttagttatttatagttagttgtagtttaaaatattaaatggaaaattttagaaataatttataaattttatattgtatattagtttagtatagtatgatgaaattttgtgtcgtttaatttgagacgtgaatttttttgtttagtatatttatgttgttatttattagttttgttggttattagattgattattatattattttagtgtatgtgtttaggtaattttgttttatttaataatggttttaaagttgatgttggtatatagttataattgttttattttagtattagtgatagttaattttttattgtgtttaatttgtaaattaaattttattataggtgtttatgtataggaaaaaatatattatatatatagcgtttagtattgtggttttaggtatttattagggattttagaatgtgttttttaaggataaagagggataattgtatattataaatattattttttgtattttgtattaatggtagagtgattgtatattttagttgatttaacgaatggtggtttaggtatagtgaagtaggagagtttttatggagttaaattatgtttagtatgtggttgattttattattagttatttagaattttatagaagaaaatttatttgatttgtaggttggagaagataggttttttttaaaagcgttattgagtttttaatttaaatagttttgttttaaagagattttttttgatttaatttaaaatagttttttaatttattttatattaaatttgtttaatttgtttatatttgttgtttttttgtttgtatgtttattatttagcgtttttatagcgtattgtaaatatgttaagtatagggattttgtttgtgttgataaatttttttttttttgagatagagtttcgtttttgttatttatttaggttggagtgtagtggtgcgattttggtttattgtaattttcgtttttttagtttaagcgatttttttgttttagttttttgagtagttgggattataggtgtatgtttttatatttagttattttttgtatttttagtagagacggggttttattatattgtttaggttggtttcgaatttttgattttaggtgatttatttatttcggttttttaaagtgttgggattataggcgtgagttatcgcgtttcgtcgtgttgatattttaatattagtgttgaggatagtatttagtatatagtggatttttagtataattgattgattgatattaaaagattaatttttgagtatattttacgttttttgtttaatatatagttaatattagtgacgtgaataatattatggaggtgatattttatggttttttgggaagtttattggtgtttttatttgtttataatgataacggagaattgagttttgttggttagtttaatgtatttttttttgaattttatatgttgaaattgttatttttgttaatataagaaaattaatagataataagtatattaaagtatagaatttagtttttttagtgagatatttagtttatttaagtggaatgtttttgtaaatgtagtggtttttttttttttttttttgtttatagt

SEQ ID NO: 310 - DNA, 8996 bp, Artificial Sequence
  chemically treated genomic DNA (Homo sapiens)
gttgtaaatagaaaaaaaaaaaaaaaaattattgtatttataaaaatattttatttaagtaaattaagtgttttattaaaaaaattaagttttatattttagtatgtttgttatttgttggtttttttatattggtagagatgatagttttaatatgtgaaatttagaggagagtgtattaggttaattaatagagtttagtttttcgttattattgtagatagatgaaaatattaataaattttttaaagagttataaagtattatttttatgatattgtttacgttattaatattgattgtatattaaataaaaaacgtaagatatatttagaaattggttttttaatgttaattaattaattgtattgaaaatttattatgtgttaagtattgtttttagtattggtattaagatgttaatacggcggggcgcggtggtttacgtttgtaattttagtattttgggaggtcgaggtgggtggattatttaaggttaggagttcgagattagtttgaataatatgatgaaatttcgtttttattaaaaatataaaaagtagttgggtgtgggggtatgtatttgtaattttaattatttaggaggttgagataggagaatcgtttgaattggggaggcggaggttgtagtgagttaagatcgtattattgtattttagtttgggtagataataagaacgaaattttgttttaaaaaaaaaaaaatttattaatataagtagggtttttatatttaatatgtttataatacgttgtaggaacgttgggtaataaatatataaataaaaaaatagtaaatatgaataaattaagtaaatttgatatgaagtgaattgagaggttattttgggttgggttaggagggatttttttggggtagagttgtttaagttaagaatttaatgacgtttttaagaggaatttgttttttttaatttgtaagttaggtaaatttttttttgtggagttttaagtaattagtggtaggattaattatatattgaatatggtttggttttataggggtttttttgttttattgtgtttggattattattcgttaagttagttgaagtgtgtaattattttgttattggtatagagtataagaagtgatatttgtgatgtatagttgtttttttttatttttagaggatatattttaagatttttagtggatgtttgaaattatagtgttgaacgttatatatatagtatgtttttttttatatataaatatttatgataaagtttaatttataaattaggtatagtaagagattaattattattaatattaaaatagaataattataattatatgttagtattagttttggggttattattaagtaaaatagggttatttgaatatatgtattgagataatatgatagttaatttgataattaatagggttagtaagtaataatatggatatgttggataaaaagatttacgttttaggttggacggtataaaattttattatgttatgttagattggtgtgtaatgtaaaatttatgaattatttttgaaattttttatttaatattttggattatagttgattgtgggtaattgaaattgtggaaagtaaaattgtggataggttggtgattattgtatagggtttaagtttagaaaaggtagggtttttaatttgtagtaattgtttgaatgtgattaggatggagtattacgtattgtgggttagtggttttgaatataattaggttgagtagcgttaattatattagtatagtagagggtaataagaggaagaggtttttttagtagttttataagattatttgtagtagttttatgatgattttaagagattttgatgggtttgtttgtatgattttaatcgtagataaattgttttagttttttaataaataaatattttattcgtagaattaagattttagaaaaggaggtatttgttaatttgtattattttttttggttttatatatatgttattatttttttttagtttgtggtttgttgggtttatgtttttttttttataaatattatgtgttatatagggaattaagtattgtgtatattatgtaaaataagatagataagttttttgtttttatggagtttatattttattagagattatattttagtggaggaaaagaatatagaagatagataatagtgaagtaaaaataaatatagatatttatgattataaataaatgaaatggggatggatatttgtttttagtaagaaattgtaggagagatataattaaggaggttaatatttaagtggagttttgaataatgaggagatagttatagtaaggggtgggaataaatataaagtttaaagtagtaagtttttgtttgggaaattggtaggatagtatggatagggtatagtgaaaagagaaaaagggatataaaagattaggttggaagagtaggtagaagatagattgtataaagggttttgaaaggtatggtaaggaatttgagttttattttgagtattattagaatattgaggagtttttgaagttattgataagtttaatgtagtatatgaattgattatttttttatttttgttaattgagagataagggtggaggttgggtacggtggtttatgtttgtaattttagtattttgggaggttgaggcgggtagattatttgaggttaggagtttgagattagtttgattaatatagtgaaattcggtttttattaaaaaaataaaaaattagttgggtgtggcggtatgtatttgtagtattagttattcgggaggttgaggtagaagaatcgttttaatttaggagttagaggttgtagtgagttgagattacgttattgtattttagtatgggtgagagtgagattttgttttaaaaaaaaaaaaaaaaaaaaagttagagagagataagggttgagatttattagagtaataattgttaaaaattttgttttgtgagataggtttttattttattttgttgtttaagtagttggtattatagatgtgtattattatgtttggttaatttttgtattttttttttgtagagatcgggttttattatattgttttggttagttttaaattgttgggtttaagagatttttttgttttggttttttaaagtgttgggattgtaagcgtgagttattgtacgtggtcgtaagttgtatttaatagtaatattaaattttttatttataaaaatatataataaaatgtttttaatttgtattaggtatttattatttttttaatggatgtgttttattaggtttaaaatagtttaagataaggaaatgttatattttgaataataggttattttaagtttataatatattggtaagtatttaaattattaaataaattttaaggttaaggaaagtatttaattttgaatagtagtttatattttattttattttgagatggagttttattttgtcgtttaggttggagtgtagtggtatgatgttagtttattataagttttattttttgggtttaagttatttttttgttttagtttttcgagtagttgggattataggtattcgttattacgttcggttaattttttgtatttttagtaaagacggggttttattatgttagttaggatggtttttattttttgattttatgattcgtatatttcggttttttaaagtgttgggattataggtattagttattgtgtttagtttatttttattaatataaagtatagatatggttgatagtatattattaataataaataataattattattttttattttaaaatatgattatcggtatttgaaatttttttagagtaggtagtgtttgcgttttttggggtaattaatatttgtttgatatgatgagattgtgtaagtttttaggttagcgtatgttttttttttttattgttaattataagtattcgggttgttattgttttgtttgtaaagtagaaattttaaaggaaaatgaaatttgtagaaagaaaattatagtttatattttaggatgtatattttagaaatttagggacgggtatagtggtttatgtttgtatttttagtattttgggaggtcgaggtaggtggattatttgaggttaggagtttgagattagttttggttaatatggtaaaattttatttttattaaaatataaaaattagttaggtatggtggcgggtgtttgtaattttaggtatttaggaggttaaggtaggagaattgtttgaatttggtaggaggagatcgtagtgagttaggattacgttattatattttagtttgggaaatagagtaagattattttaaaaaaaaaaaagaaatttagatttgtaaatataatttaagtaattatttgtatttatataaatgatatttttatttaatgatttatttttgaaaaattgggatttataatttgagaaatatgattgtcgttataagtataagggaggtattttaaaaagaaggtaggttggtttagagagttaggttaaggagttaaacgatgatttttagttttttatgtgataattttttttttttgggttttattttaaaaagatttaataattattatgttttagttatgaaatgaattttgttttagatttaaaatgtattataaaatattaatttttaaattttgaaattttatagataattaggttattataaattaaaggatatattgaaaattggggtaagtaaattttatataaaaagggttatatagttttgttaaaattattcgattcggttattttagtaggaaagtaattaaagataatacgaagatgaattaatgtgttaatgtttagaaaaatttaatggatttataaataggtagtgggttagagattattgttgtttattagtattttaagtagtaggaaattattaaaggtttgtaataaataaacgtgattcgtttttaataaaattttatgtacggatattataatttgaattttataaaatttttatatgttataaaaattttatttattttttgtttttttttttaattatttatatttggtgagttgtataaaagtaggtagtagaaggatttggtatgtgggttatagtttgttgatttttaatttaaatagcgtaatatgttagaatattggtagagaaggtaaaaattaaattttaatttattttattttagttttggtatttgagatttagaaggatggatataatagtagtgtaatttaggagattaattgaaatgatatttataaataagtataatttggtatttagtagtagtaaatgttaatttgttatatttatttattataagataaattggtaataggaaaaagaaaattgaaaatttattttgatgatgttgggattatatattttaagaaaaatgtaagttgataatatataaaattaatatttttttgagtatttaattttgggtagggtattatttaaaatgtttgttatgaaagaattttatgagggagatattattattattattaatttgtagataagataaggaggtttagataggtaaataatttgttggaggttatataggtaagagggggtggagtttaatagaagtaattttgttttagatttttttaataagtgaaacgatgattattgaaaatttgagaaaggaaaaaaaaaaattttgttaaattatagtttcggaaggaatagttattttagtgtaacgggaaaatatattttatttgttatgtgtatttgaaataaatagattttttattttatttatttatttatttgtttagatagtttttttttgtcgtttaggttggagggtagtggtgtgattttagtttattataattttcgtttttcgggtttaagcgatttttttgttttatagttttttaagtagttgggattacgggcgtgcgtcgttacgttaggcgaatttttgtatttttagtagcgacggggttttattacgttggttaggttggtttcgaatttttgatttttaatggttaatttattttggttttttaagtgttgggattatattatattcggttagaaataaatagatttttaaatttagagtaaatgttatatttttagtttgaatatagtagtagtgtgggaaaattttgtttattttagtggattattgaaaatagttttattatttagtggtgaggacgtttgggtttttgagttttatatagcgttttggtttgggtagagacgttgttttatattagtaggaagattttgggggattttattaattttgggttttattttttagaatgggtaatataagtagaataagataggtaaataaagtcgtattagaggatatggagaataaagtagaaattaattataaaattaattaagtaatttgttagagataacgggtgtataaagagaaagtatattaatttagggttatgttttaaaaatgtataaagatataaaaaggttttgatattttagaaaataggaaaagtaaaagagtaaatagaaattagttaatagtagtaagtgaaaagtatatggttaatttttatttatcgtatttataaataataggaaaatttttataaattagtttttatggttttatttagttcgcgattttaaatttttaaattaaagtttaagcgcgtttcgtgtaaaagcggagggggtttacgtatcgatatcgggtggttatttggttttcgtttgttcgttcgtcggaagtcggtttatcgggatcggcgcgggattagcgcggtatcgttttttattgtttcgttttacgacggtttttttgttttattggttcgcgcggttttgggttttcgcggcgagaatttagtttgattttttttcgttttgggcgttgtttgattgttttttagtcgagatatttaagttttagtacgtttataatgtgatagtggtacggggtgttacgtagtgtttttaggagcgtcgggggggagcgttaaaatgttaaatttatttttagttaattgtgcgtcgtttacgagttagagttgagtagttatcgcggaaaaatttcgtgatacgtttgatttttgatgagattaaaatgtatcgggttttgaatgtcggtcgtttaggatattcggtttattgttaaaaaaaaaaatgaggttggttatagaacgtattggggaagatatagggtaatagcgagtttttttttttatatgttagtgggggcgggggttgaaaaattttttttcggatgtatatttttgtcgaaattgaatttggcgttatttgagagcgtttgaaagtcgtgtgttaaatatcgggttgttttttttgttttttttttttttcgtttttaattttaggtatttagtaagtttgttaaggtttttaaatattgttggggattgataatttatgcggatacggtcgttttaagagagacggtttttgtaatggcgtttgcgttagatattaatatggcggatatagtcgtgcgcggcgtaaacgttagtatttttattttagtcgtttagaaatagtagaggagagtagggtcgtgtttattgattggtttttcggtggagcgggtcggatcgggtattttttttggagttaattaggaaggcgagagatcgaattggttcgtgcgttttttttcgaggtatgttgggagtttggaggattagcgaggaggagttgagagaacggagcggacgttatggcgattaatatcgagtagatttttaggtttttcgtggttagtaaatttcgggaaatttaataggagttttttaggtaaacgttttttagatttttttgtttttaacggatcgttaggtttttatttagttttttttggtattttttttcggagacgtagtcgtttttcggtttaggtttcgttagggtttcgtttgggtttgggatttatttttcgggttttttttaatcgtttttttagtcgtttttttttttttttttcgaggaatttcgtttttttcgaggtaatttaagattttttgttttagaatcgagttaagatgtttattttttttttttgtttgggttttttttgtcgtttagttattcgtaggttcggttgttcgttagggacgggtttagttttttttttagtttttttttcgtcgtcgcgtattttttttttttttcgttttcgcggattttgtcggtcggtgtttatgatcggaaagggtttttaacggtcgttttttggttaattttaaattttttttattattgcgagttttagatcgtttgggggtttggatttattaataagattattcggggtttagtgttttgtagtatttgttagtcgttttgatagttaaatgttttaattaaaacgaatttaaattgatgtatttgttagtttgttaaaatattcgagataaagatggaaggggattttgaaatggttgcgattaattatagtaagtgaaagtggattttgtgtgtaggtttattatttttttgttatttttgttttagttgatacgttatttttgttattgttggtagattttatataatttgcgtttggttttataaaatttgaaggcgaagagattgttaaagaaatggttgtttatttaggaaaatagtgtgttatgtttagcggttgtttttcgatatttgtttttgtataagatatttatttttttaaagtatagaagtaggaaagagattttgaaacgtaagtgtttcgagtttaagtgtttttaattgtattttaaaagttgagagtaagagtagtacgtgaatttgaaaatgggtcgaaaattagttgtaagtgtttaaagtaatataggattattagggtaatgatgtattattgttagaattattatttttgtagaatgtgttgttttttaagtggaaatagatttatttatattgttttttaaatttttgtgatat

SEQ ID NO: 311 - DNA, 5183 bp, Artificial Sequence
  chemically treated genomic DNA (Homo sapiens)
tgtgtttagtttaataaagaggttttttaagtttagatagatgaggttttagtaagtgataagttattttgagttagtttaaatttttaggttaatatgtattaggaattgttgaatttgatagaggggtatacgagggtttattatattattttttttatttttttttttttgagatagcgtttgtttgttatttaggttggatggaatgtagtggtacgaatatggtttatagtagttttaattttttgggtttaagtaatttttttattttagtttttcgagtagttgggattataggtatttattattatatgtggttaatttaagtagatatgaggtttttttatgttgtttaggttgtttttaaatttttgaggttaagtgatttgtttgttttagttttttaaagtgaaaatttttgtatgtttgaaatgttttttaataaaggttttgttttgtttatttttagataaattacgttttagattgttgtaattaaaatagtttaatttttaggggtgtttttagagatgttgtggagatttaaagaattcgtgttgattttggtggtaatttatgagtattttgaaaggatagatgtgattagtggtaattagtacgggtttattaagttagagtatattaagatgaatttattttattatatatttaatttttaatttttaatttatttatttagagatttagttatgagataggttaatttttgtatttttgtggggaaaagtaagagagattagattgttattgtgtttgtatagaaagaagtagatataggagattttattttgttttgtattaagaaaaatttttttgttttgagattttgttaatttatgattttatttttaatttcgtgttttttgaaatatgtgttgtgttaaatttagggttaaatggattaagggttgtgtaaggtgtgttttgttaaatagatgtttgaaggtagtatgttcgttaagagttattattattttttaattttaagtatttagggatataaatattgcggaaggtcgtagggatttttgtttaggaaagttaggtattgtttaaggtttttttttatgtgatagtttgaaatatggtttcgtgggaagggaaagatttgatcgttttttagttcgatattcgtaaagggtttgtgttgaggaggattagtataagaggaaggaatgttttttgtagttgagataagaggaaggtatttgttttttgttcgtttttgggtaatggaatgtttcggtataaaattcgattgtacgttttatttattgagatagggaaaaatcgttttagggttggaggtgggatatgtaggtagtaatattgttttgtaaagtattgagatgtttatgtgtatatatatttaaaagtatagtatttaattttttattttgtttatgatgtaaagatttttgtttgtttgttgattttttttttattattgttttgtgattatgatatattttttttttagagaaatatttatgaatgattaataaatattaagggaatttagaggttggcgggattttttatatgttgaatgttggtttttcgagttttttttttatattttgtttttgtgttttttttttttttaagttttttattttattttacgagaaatatttataggtgtggaggggtaatttatttttttaattttttgagacggggttttattatgttgttaaggttggtttcgaatttttgggtttaagtgatttattagttttggttttttgaagtgttgaaattataggtgtgagttattatgttcggttttagtttattttaatttaaggttaggaatttgatttattagagaaacgtagtagataatatatttggattttagtaaattgtttggtagaattttatgatatttgtttgagaggtttatagtaaggtggaaagggttgttttgttttatataaatttaggggagaaagttttattttggagttaatagattgggtttgaattttggttttgtttttttttagttgtgtgtttggttgttattttatttttttgagttttaatttttttattagtaaaagtaatatttattttttagggttgttgggagggagaataagaatttttaaagtattcgaatttagtaattaggatattatatttgtaggtaagatgaagaggggtggggaagtaataggaaatagtttaaatcgagagttataatagtttttttttatttagtgttagtgtaggtttgtgattttgtttttaaaaacgtttggggtaagttgtaggaaagattcgagatagtttatgttttattataagtttaagggaggaggattttaggtagggagattatttatggtatttgttaaggagaaacgttattgattagagagaggtttagttatgtatttcgtgtttggtgaatttttgttttgatttcgttgtttttagaagtgtttaggtggaaattggaaggtttataagaggtaattcggtagtatatagtggtttacgtttgtaatttaaaatttaagtattttggaaggttaaagtaggaggattatttaagtttaggagtttaagattagtttaggtaacgtagtgagatttatttttattaaaaattttaaaatttgttaggtatggtggtgtgtatttgtagttttagttatttaggagagttagagaatcggcgtatttcggagttcgaggttgtagtgagttatgattacgttattgtattttagtttgggtgatagagtaagatattgttttaaaaatataaataaataaataaataaataaataggtcgtgcgtagtggtttacgattgtaattttaatattttagaaggcggaggttagcggattatttgaggttaggagttcgggattagtttgattaacgtggtgaaatttttaattttattaaaaatatataaattaggcgggcgtggtggtggtcgtttgtaattttagttattcggtaggttgtagtaggagaatggtttgaattcgggaggtagaggttgtagtgagttaaaatttttttattgtattttagtttgagattaaaaaaaagaggcgattttttatatcggtggaaatttgagttgtttaaattttggatgttttttttagttttaatattttagatttttttggtggataaatattttatttttttttttttgagtagagtttttgagttttggttcgttgggaatttgttatttttaaaaaagttcgaggttcggattgtttttttcggagttttgaggttgatgagacggagcgagagaggggtcggggtcgaatggagtttattcgcgggtttagggaggtcgttagagggcgttcgggatcgatcgtaagaataattttttttttttttcgttaatttttcggtagcgcgtcgtttagggtgggggtttcgagggttggggtcgtcggtttttttttggggatttttcgttttagagaaagttaagcgttaggcgtagttaaagtcgagaggtagcggaagttttcggttcggggtggcgttgggttagcgggtattttttcggcggttttttggtcggtcgaattcgcgtttggtgttttgttatttcgtttttcgttttgagtgagtttgtttttttttaggggcgcgttcgagtcgtttcgggttggttgcgttagtttagagttaaatttttagttaatgaaaaagggcgcgaggcgtgacgtacggaaacgttatgggaattttttttttcggggggtcgagaaggggttttttcggttttgagttttgttggtaggcgaggtgtcgcgatcggttttaggtgggtcgggcgcggagagaagtcgtaattagagtcgtcgttacggtgagtggttggatttagatttttgggtggtcgggataagagaaaagagggaggagggtttttagcggatagcgtttggggttggagagtagtagttgtatatagtcggaaagggcgcgtaggcgacgatattcggatttacgtcgatatcgttgtataaagatacgcggattcgtacgtatatttgtatttgtgttggcgtatatacggtagcgttcgtgtagtcgtattcgtatatatatgtatacggagacgtgtttatcggtgtattggtgtttgtatttatattttttacgtataaatttaagatacgtttattcgtgttcgtatattaagataggcgttgatatatatttatattgagaagttcgggatttatttatttatatatatgttcgtttgtatatttatgttgacgttatggatatataatatgtaattaagtattatagtcgaaatatatttgtggagttgtgatggagatatatttttgtattaggtgggggggggggggggggagcgtgtagagatttttttgtcgtttgcgcgtttagaatcggtgcggtgtgggattagttgttgttgtgaggtttgggagagagagaaaagagtttatttcgaggaggagatatttttttcgtagttttagaatcgcgttttcggggtagaatttcggggttttttataggaaagagttttcgtttataggttgttcgaaggggaggtcgttcgatagtaggaatgtttttttaaaagttttcggggtttattagtcgtggttttttttttggtagaaaattttaaggttgttttagatcgggggaggggagcgggaggcggatttggttttagattgttagttttttttcggtcgtgaaagatttttttgttttttgttttggagggaggagggggtttaatttttatcggggtttttcggatttttttagatttttgttcgttgaaaagtagcgggagttcgtagattgtcgagggtttttcgtttttttcgtcgcgagggcggggttagtggcgttatttttaggttcgtttttttcggtttcgtttttttttggtattttcgggatttttttaagttgttttaatttttttgtttttttttcggttaagtttaatttcggatttcgttttttatcggattttattcgttatattcggataggcggttggaggaggtcggatttttttttaaatttgggtttttatttttcgtttatttttatttagatttgatttttttttttacgttattttttttaattttagg

SEQ ID NO: 312 - DNA, 5183 bp, Artificial Sequence
  chemically treated genomic DNA (Homo sapiens)
tttaaagttgggaggagtggcgtgggggagggggttagatttaaatgggggtgggcgggagatgggggtttagatttgggggagggttcgattttttttagtcgtttgttcgggtgtggcgggtgagattcggtggagagcgagattcggagttgggtttggtcggggaaggggtaggaaagttagagtagtttaggaaagtttcgaaaatattaaggggaggcggggtcggagggggcgggtttggaaatgacgttattggtttcgttttcgcgacgggaggggcgggaggttttcgatagtttacgggttttcgttgttttttagcgggtagaggtttaggagaattcgggaagtttcggtgggggttaagtttttttttttttttagggtagggaataggagggttttttacggtcgggaggaggttggtagtttggggttaagttcgtttttcgtttttttttttcggtttggagtaattttgggattttttgttaggagggaggttacggttgataaatttcgggggtttttggggggatatttttgttgtcggacggtttttttttcgaatagtttgtaggcgggggtttttttttgtgggaggtttcggggttttgtttcgagaacgcgattttggggttgcgggaaaagtgtttttttttcggagtgggttttttttttttttttttaaattttataatagtagttggttttatatcgtatcggttttgggcgcgtaggcgatagggagatttttgtacgtttttttttttttttttttatttaatataagagtgtgtttttattatagttttataagtgtgtttcggttgtagtgtttggttgtatgttgtgtgtttatggcgttaatatgagtgtgtaagcgagtatgtgtgtagataggtgaatttcgagttttttagtgtgggtgtgtgttagcgtttgttttgatgtacggatacgggtgagcgtattttgagtttgtgcgtgaagggtgtgggtgtaggtattagtgtatcggtgggtacgttttcgtgtgtatgtgtgtgcgagtgcgattgtacggacgttgtcgtgtgtgcgttagtataggtataggtgtacgtacgggttcgcgtatttttgtataacggtgtcgacgtggattcgagtgtcgtcgtttgcgcgtttttttcggttgtgtgtagttgttgttttttagttttaggcgttgttcgttaaaggtttttttttttttttttttttgtttcggttatttaggggtttgaatttagttatttatcgtggcggcggttttggttgcggttttttttcgcgttcgatttatttgggatcggtcgcgatatttcgtttgttagtagggtttagggtcgggaaagttttttttcggtttttcggaggggggaatttttatgacgttttcgtgcgttacgtttcgcgtttttttttattggttgaaagtttaattttggattggcgtagttaattcggagcgattcgggcgcgtttttgagaggggataggtttatttagggcggggagcggggtgataggatattaggcgcgagttcggtcggttaggggatcgtcgagaaggtattcgttgatttagcgttatttcgggtcgggagttttcgttgtttttcggttttggttgcgtttaacgtttggttttttttgaagcgggggatttttagggggaagtcgacggttttagttttcggggtttttattttgagcggcgcgttgtcgggaagttagcggaagaggaaggaagttatttttgcggtcggtttcgggcgttttttggcggtttttttgggttcgcgagtagattttattcggtttcggtttttttttcgtttcgttttattagttttaaggtttcgggagagatagttcggatttcgaatttttttagaagtgataggtttttagcgggttagggtttaggagttttgtttaggagaagggaaatgaagtgtttatttattaaggagatttggaatattagaattgaaaaaggtatttagagtttaaatagtttaaatttttatcgatgtgggaaatcgttttttttttttagttttaggttggaatgtagtgaggggattttggtttattgtaatttttgtttttcgggtttaaattatttttttgttgtagtttatcgagtagttgggattataggcggttattattacgttcgtttaatttatgtatttttagtagagttgggggttttattacgttggttaggttggtttcgaatttttgattttaggtgattcgttggttttcgttttttaaaatgttggaattatagtcgtgagttattgcgtacggtttatttatttatttatttatttatttatgtttttgagatagtgttttgttttgttatttaggttggagtatagtggcgtgattatggtttattgtaatttcgaatttcggggtgcgtcgattttttgatttttttgagtagttggggttataggtgtatattattatatttggtaaattttaaaatttttagtggagatggattttattgcgttgtttaggttggttttaaatttttgggtttaagtgatttttttattttggttttttaaaatgtttggattttggattatagacgtgagttattgtatgttgtcgaattgttttttatagattttttaatttttatttgaatatttttagaggtagcgaggttaggatagaaatttattaagtacggagtatatgattggatttttttttggttagtagcgtttttttttagtaggtgttatgagtaatttttttgtttggagttttttttttttaggtttatggtagaatataaattatttcgggttttttttgtagtttgttttagacgtttttaagaatagaattataggtttgtattggtattaagtaaagagagattattatggttttcgatttgggttgttttttattatttttttatttttttttattttgtttgtaaatatagtgttttagttgttaggttcgggtattttagaagtttttatttttttttttaataattttaggaggtgaatattatttttattgatgaagaaattaaggtttagagaggtggagtaataattaaatatatagttagaaagggatagagttaggatttaaatttaatttgttgattttaggatgaagtttttttttttaagtttatataaaataaagtagttttttttattttattgtgggttttttaaataaatattataagattttgttaaataatttgttgaaatttagatatgttgtttattacgtttttttggtaagttagatttttaattttaaattaaaatggattaaggtcgggtatggtgatttatatttgtaattttagtattttaggaagttaaggttggtggattatttgagtttaggagttcgagattagttttggtaatatggtgaaatttcgttttaaaaaattgaaggggtgggttgtttttttatatttgtgggtgtttttcgtgaggtggaatgagagatttggaaaagaaaaagatatagagataaagtatagagaaaggattcgaggaattagtatttagtatatggaggatttcgttagtttttgagtttttttagtatttattgattatttatgggtgtttttttgagagggggatgtgttatggttataagataatagtggggagagggttagtagataaataaaggtttttgtattatagataaggtaaaggattaagtgttgtgtttttagatatgtatatatataaatattttaatgttttataaagtagtattgttgtttgtatgttttatttttagttttaaggcggtttttttttattttagtagatggaacgtataatcgggttttatatcgagatattttattgtttagggacgggtaggagatagatgttttttttttgttttaattgtaagaggtattttttttttttatattaattttttttagtatagattttttacgggtgtcgggttgggggacggttaggtttttttttttttacgaggttatattttagattattatatggggagaaattttggataatatttggtttttttagatagaggtttttgcggtttttcgtagtgtttgtgtttttgggtatttgagattagggagtggtgatgatttttaacgagtatgttgtttttaagtatttgtttaataaagtatattttgtataatttttaatttatttaattttgagtttgatatagtatatgttttagagagtacggggttgggggtaaggttatagattaatagaattttaaggtagaagaattttttttagtatagaataaaatggagttttttatgtttatttttttttatatagatatagtaataatttgattttttttgtttttttttataaaaatataaaaattagtttgttttataattaggtttttaaataaataaattaaaaattaaaaattaaatgtataatggagtaaatttattttggtatattttagtttagtaaattcgtgttggttattattgattatatttatttttttaaagtgtttataaattgttattaaaattagtacggattttttgagtttttataatatttttaaaagtatttttaagggttgagttattttagttataatagtttaaggcgtaatttatttaaagatgaataaaataagatttttattagagaatattttaaatatataaagatttttattttgggaggttgaggtaggtagattatttgattttaggagtttgagaatagtttgggtaatatagggagattttatgtttatttaagttagttatatgtgatggtgagtgtttgtagttttagttattcggaaggttaaggtgggaggattgtttgagtttaggaagttgaggttgttgtgagttatgttcgtgttattgtattttatttagtttaggtgatagatagacgttgttttaaaaaaagaagagtggagagaatagtataatgagttttcgtgtgtttttttgttagatttaataatttttaatgtatgttagtttggagatttaaattaatttaaaatagtttgttatttgttagagttttatttatttgggtttaagaaatttttttgttaggttgggtata

SEQ ID NO: 313 - DNA, 6120 bp, Artificial Sequence
  chemically treated genomic DNA (Homo sapiens)
tttttagttattgttatcgttatttaagaattttaaatttgttatttataataaagttgatttgaagtgttatttttttttggaggaattggggagaagaatgggaaaaaagatgggagtgattgtataatgttagtattttgtgtttttggtttagtatttggattggatggaggatgtaagtatagtttaaaagtaagaataagtatatttaggggttttatgataatttagggtattatttgaaagtaagaatttagtagttaagggagaaatcgtatatattaggttaggggtttttaatttttgggttatagattggtattggtttatggttttttaggaattgggttatatagtaggaggtgagtaagtattattgtttaagttttattttttgttagattagtataagtattaaatttttataggaattcgaattttattgtgaattgtgtatgtaagggatttaagtttttcgttttttacgggaatttaatgtttaatgatttggggtggaatagttttattttgaaattagtttttcgtcgttatcgatttatggaataattgttttttacgaaatttttttttggtgttaaaaaggtaggagattattgtattagatgatgtatatattttgttttttattttagggtttttatttatggttatttaggagatttttaaggttataagttaagtagatggagagagtattttgaaattttgtttattttgtagtaatatgttgttaggtttgaaatatggagttatgaggtattttgaaagttaataatatttatagtttattaagtatttattatgtattaagtgttttattatattattaatatattaattttatgaagtaggtgttattaaaattttattttatttagaaattgaggtatagagatttgtttaagattgtaaggaataagcggtaggattagatttttttattatattttatattttaaattatttagttataaattttttaatatgataggttgttatttagaggtattaaatggttgtttgttttgttttttttttgatgttaattagtttgattagtattgattaaagattaagttagagaggtagttttttttttttttaattttattttatttttttttttttttgaaatagggtattgttttgttgtttagtttggagtgtagtggtataaatggtttattgtagttataattttttgggtttaagtaatttttttattttagttttttattgttttatatttatattttttatgtttaaaataaatttttttttgttttttgtttgtattaaattataagtttttaaaatgaatttttttcgtattttatttggtatatattttgttttttgaatagagtgtattttttattttattttattttggagacggagtttcgttttgttatttaggttggagcgtagtggtataattttagtttatcgtaattttcgtttttcgggtttaagtaatttttttgttttaattttttgagtagttgggattataggcgtatgtggttacgtttagttaattttttgtattttagtaaagatggggttttattatgttttttaggttggtttttaatttttgagtttaggtaatttattcgttttagttttttaaagtgttaggattataggtgtgagttatcgtagtcggttattttttgaatagattttaaatatttagaggttagggatgattatttaatatatatatattgaatatttattatgtgttggattcggtgttagggttttatgtatatatttgagagttttatatttttggatttgaattttttattttttattggaattatgttttttttagtttcggtaagtaagagggaagatcgggagggttaaattttatattagggtttattttagggagggaagggatttggttggggggagggggattttgaggagtgaaattattttttgtgtagttagtttttgtgttgatagaaagagtagaaaaggaggtggggtggagggagtatagttagggattaggggattattgaggttttggagatgagatcgttaggagtttttttttattatgagttttttttatttttgtagttggaggagttttttttagttttagtgttgttttggggcgagagagattgaataagttgtttgggtgggaagagaatggaggaagttgatagggatgggcggggttcgtgggggggttgattaggaatttagttttttgtttagtatttaggtatttagtttttagtttatttttattttttttagtttttattttttttaggaatttaaggttttagttttttttttaaattttagttattttttttttattagttttttttttttaggggatggaggttgagagattttaggaagaagaggatggtgagtaggtgagttgggtacggggttggggaggttgatattgggaaagaagggaggtgagaggatttggggtagaaatgtagggatataggggttttgaaaggtttgggtaaattgaggtaggaatagagatatatagagaggaaacgggttattggtttagttttttgtttatttttttcgttttaattattattgtttgattagaatggatatattttggtattagggttttttttaggatgaggaaggttggttttttttaaattttattattcggttttggcgagttgtttttttattttttttttttttagggattcgttatataggtatttttatttatttagggagagtttcgattttagtgtttatattttgattttattattaaggtttattttattgtgggttttttttttattttttttagattttttttgggattttttattgtatttttttttttttgatttaaagtttttaattacgttattttgtttatatttttttacggtttttgtttgttaatttttttgggtttttgagttttttatatttttttttttagttttgggatttcgttcggtttttttgttttttttgtagattgaattttttttggatttggtggttgaagtttagtttcgtcgtttggaggagtagagggttattttttatattttttaaaattttttaagtttagtttttgttttatttcgttttttcgaggatagagaatagttttatagtattatttttagttattaggtaagatatttttttaggaggtaaatttaggttttttggttttttggtttttgttttttttggggttttatttttgtttttttttaggtattttatcgtttttataggttttttatatgtttttttatattaatttttgatttttttaagaattttttttttttagatttttattaaagttttttttttttttttatttttttagtgttagcggatggaagtttagcggttagagttttttttttttttaggggggtaagagtttttggagttgttgttgagagtttagggtgggggtcgaatggaggagtaaaggtttcggttttttatatatatttgttgagatttgagttttaattagtttttttttgttattggttttaaagttgggtagtttattgtatgtttttaatttttgtttggtaggggtattagagattgaaagatacggtataaattttaatatttattttttatattattttttttgggaattggatagggtgaaagtttttaaattttgggaataggcgagatggaatagggatttaatttttcgtttataggtttatgggagtttgaggtagtaagggggattttaggtatttattttaaggagtggttgggagttttttttttaatttgtggggatattattagttgttaagttattaggtagtagggtttgagggtttaggtttttatttgagaggttataatttgagagatagttttatttttttttttagtaagaagggaaggtgggtgggtatttgagagattaagattatttttttagttttattattagtattttcgatttttgagattgaggggtttacgggttgtgaatggatttttagttttgtttattttttttttttattgttgttgagtttgtttgatgttttggttgtgtgaataaatataatttttttttggattgtagattggtatttggggggtttaggcggggtgaaaggtaggaaggtgaggttagaggttttttttttttttagtttggttagaggttagttttttttttcggttggttaattattggtttattaagtagcggttggagatttttttaattattttttttagttttttttttcggttttaattaagtagaatagggaggggagttattagaataagaaatatgaattgagttgtcggtgaatttaggtattttagcggtttgagtttatatcgtttagatttttgatttaggatttaggtgatagacgtttttagtcgttaatatagttttatttttaggtcgcggaagtttagttagggggtttttttatattttttagatggttcgttttttttttttatttttttttttttttttttttttttattaggttttagtttttttgtttttgtgttttttttttcgtttttagtttttttttgttttttttttttttttttttttttttttttttcggttttttttttttagtttttttttttcgtttttttttttttttttttttttttttttttttttttttatatatattttcgtttgggtttttttttttttttcggttttatttttttcgtcgtcgggggtcggggttttttgtggggggtttagtcggtattttaggtttttttttagtgtcggggtgaattttcgggggagtcgggagtcgggggtagacgggcgggggttggggcggagggagtagcggttttagcgagtttggggggagaagtaattaggcggggggaggggcggagtagggagggggttttagggtttttttttagttatggacgaacggttattggggtcgttttttttaggcgggggtcgggggggtttaggattggtgagtggggagtttgggggttttggcgagtttttcggtggcggagatttcggtgggggtagcgggggggtttcgggaggtcgagggaagtaagatatcggggatattttgtagtagataatgattattatcgattagagtttggacgaggtttaggttaagtgagtgtttttatttcgggattttatatagatttagtaaatttcgtttatatgttttgaattttttgggagttttttttaattttagggttttttttaggatttaatagtttttttttttttttatttttgggagtttatagaaaagtgattttttttaaatttttttttatttttaggttttgaaatttttatagagggaattttcggtggttcggttttttatttttaattttttgtcgatttttgtagttttttggaatagttttattttcgggagttttttttggtttttagattaagaaattgtttttgggttacgttatttttttttttaattttttatttagtttttttattttttttagatgtggagatttttatattttttttagagtttttaaagtttttttttattgtttagttagatattaggtgtattaaagttttttatttgtttagttttaggatttttttatatattttatattgatttttttagttagttcggtatttttagttttattttgttattttaaattttgattttttttaattttagtttttgtttttttttttttgaaatttattaagttatttttttttttttatttatttttagatttttttttttatttttttagattattttttaaagttcgtagtttttaatttgttgtttgtattttttttgtgtttttttgaagttgaggagtttttttatgttttgggagttgatttttttttaagaattttttattttatttttaatttattttatttttaattcgtttttttttttcgtagattgatttttttttttttttgtttttaggttttttgttttgtttttttagttttttaatttttttttttttttatttttattttttttaagg

SEQ ID NO: 314 - DNA, 6120 bp, Artificial Sequence
  chemically treated genomic DNA (Homo sapiens)
ttttgggaggagtgggagtggggaaagagaaaagttgaggagttagagaaatagagtagggggtttgagaataaggagggaggagggttagtttgcggagggaggaagcggattgggggtggaatgagttgggggtggaatgaggagtttttgggaaaagattagtttttagagtatggggaagttttttagttttagggagatatagggaagatgtaggtagtaggttaaaggttgcgggttttgggagatggtttagaaaggtaggaggaggaatttgggagtggatggagaaaggaaagtgatttggtaggttttagagggagagagatagaggttggggttgagaagagttagagtttgaggtggtagagtggggttgggggtgtcgagttaattggggagattagtgtagggtgtgtgaaggggttttggggttgagtaggtgggaggttttgatgtatttagtgtttggttgagtagtggagaggagttttaggggttttggagagggtgtggaggtttttatatttggagagaatgagggggttgggtggagagttaggggagaagataacgtagtttaagaatagttttttagtttgggagttagagggggttttcggggatggggttgttttaggagattgtaggggtcggtaaaaggttaggagtggggagtcgggttatcgggggttttttttgtgaaggttttagggtttgggggtgaagggaggtttgagagggattatttttttatgggtttttaggaataaggagagaagagagttgttggattttggagagggttttggagttggggggggtttttagaagatttagaatatgtgaacggggtttgttgggtttgtgtggggtttcggagtgggggtatttatttggtttgggtttcgtttaggttttggtcggtgatggttattatttgttgtagaatgttttcgatgttttgtttttttcggtttttcgggattttttcgttatttttatcggggttttcgttatcgggaggttcgttagggtttttaggttttttatttattaattttaggttttttcggttttcgtttggagggggcggttttagtagtcgttcgtttatagttgggggggggttttgaggttttttttttgtttcgttttttttttcgtttggttatttttttttttaaattcgttggggtcgttgtttttttcgttttaattttcgttcgtttgttttcggttttcggttttttcgggggtttatttcggtattgaagggagatttgggatatcggttgggttttttataggagatttcggttttcggcggcggagaaaatggagtcggagagagagaggaggtttaagcgggggtgtgtgtgagagagagggaggagggaggagggagaaggggggggagcgagggagggaggttgggggaggggagtcggagaggaagaggaggggagaagagaggaggaatagggaggagttgggggcggagagagagatatagaaatagaggaattgagatttagtggaggaggggagagggaagaggggatgaggggaggagacgggttatttgaaagatatgggaaagttttttggttggattttcgcggtttaggagtggggttgtgttggcggttgggggcgtttgttatttgggttttgaattagggatttaagcgatgtggatttaggtcgttggaatgtttgggtttatcggtagtttagtttatattttttgttttaatgatttttttttttgttttatttaattaaaatcgaagaggggggttgggggagataattagggaggtttttagtcgttgtttaatgagttagtaattaattagtcggggaggggagttggtttttggttagattggggagagaaaaggtttttggttttatttttttattttttatttcgtttgggttttttagatattagtttgtagtttagaggggaattatatttatttatataattaaaatattagatagatttagtagtagtggggagggagggtgggtagggttgaaggtttatttatagttcgtaaattttttagttttagggatcgggggtgttggtagtgggattgggagaatagttttaattttttaggtgtttatttattttttttttttattgggaggaagggtagagttgttttttaggttataattttttaggtggaggtttgagtttttagattttattgtttagtagtttgataattggtggtgtttttataagttagggaaaagatttttagttattttttgagatgggtgtttgggattttttttattgttttaagtttttatggatttgtgggcggggagttaaatttttgttttatttcgtttgtttttagagtttgaggatttttattttgtttagtttttagggaaggtgatgtgggagatgaatattgagatttgtgtcgtgttttttagtttttggtatttttgttaagtaagagttgagggtatgtaatgggttgtttagttttgagattagtggtaaggaagggttggttggggtttaagttttagtaggtgtgtgtggggggtcgggatttttgtttttttattcgatttttattttgaatttttagtagtaattttaggagtttttgtttttttggagggaggggaggttttgatcgttgggtttttattcgttggtattggaggagtggagggagagggagagttttggtgagggtttgagaggaggaggtttttgagaggattaagggttggtatggggaggtatataggaaatttgtgaaggcgatggggtgtttagggagaaataggagtagagttttaaagagaataggggttaagagattaggaggtttgggtttgttttttggggggatgttttatttggtgattgaggatagtgttgtaaagttgttttttgttttcgagaggacggagtggggtaggggttaggtttgaggggttttggggggtgtagaaagtggttttttgtttttttaggcggcgggattgggttttagttattaggtttagaaggagtttagtttgtagggagagtagggaggtcgagcggggttttagggttggggagaggggtgtggagggtttagagatttagagaggttggtagataggagtcgtgggggagtgtggatagggtgacgtgattagggattttggattagaggagagggggtgtaatggggaattttaaggggagtttggaggaggtggggagagggtttataatggagtgggttttggtaatggggttaggatgtgggtattagggtcggggttttttttgggtgggtaggggtatttgtgtggcgggtttttggaggaggaggggatggaggagtagttcgttaaggtcgagtggtggagtttggagggggttagttttttttattttgaggggggttttgatgttaaaatatgtttattttagttaagtagtggtggttgaagcgggaggagtggatagggggttaggttagtggttcgttttttttttgtgtgtttttgtttttgttttagtttgtttaagttttttaaggtttttgtgtttttatatttttgttttaggtttttttatttttttttttttttagtgttagtttttttaatttcgtgtttagtttatttgtttattatttttttttttttggggttttttagtttttattttttagaggggagaaattggtgggggaggggtggttgggatttgggaggagggttggaattttgggtttttgaggggagtgggggttggaaggggtgggggtgagttgggggttggatgtttgggtattgagtaggaagttgggtttttggttagtttttttacgggtttcgtttatttttgttaattttttttattttttttttatttaaatagtttgtttagtttttttcgttttagggtagtattgagattgggaaaaatttttttagttgtaggagtggagggggtttatggtggggaaggatttttggcggttttatttttagagttttagtagttttttaatttttggttgtgttttttttattttatttttttttttgttttttttgttaatataggaattagttatataggaagtggttttattttttagaatttttttttttttagttaggttttttttttttttaagatagattttggtgtaggatttggttttttcgatttttttttttatttatcgggattgggaggggtatggttttagtgggaagtggaggatttagatttagggatgtggagtttttaaatatatatataaaattttagtatcgggtttaatatatagtaagtatttaatatatatgtattgaataattatttttgatttttaggtatttaaaatttatttaggagatggtcggttgcggtggtttatatttgtaattttagtattttgggaggttgaggcgggtggattgtttgagtttaggagttggagattagtttggggaatatggtgaaattttatttttattaaaatataaaaaattagttgggcgtggttatatgcgtttgtaattttagttatttaggaggttgaggtaggagaattgtttgaattcgggaggcggaggttgcggtgaattgagattgtgttattgcgttttagtttaggtgatagagcgagatttcgtttttaaaataaaataaaataaaaaatatattttatttaggagataagatgtgtattaaatagagtacgggaagggtttattttggaaatttatagtttagtgtagataaggggtaggggaaagtttattttgggtataagagatatagatatggaataatgagaggttgaggtaggaagattgtttgagtttaggaggttgtggttgtagtgagttatttgtgttattgtattttaggttgggtaatagagtaatattttgttttagaaaaagaaagaaatgaaatgaaattgaaaagggagaggattatttttttggtttggtttttgattaatgttaattaggttggttggtattaaggaaggagtagggtagataattatttggtatttttaaatggtaatttgttatgttagggagtttatagttgagtgatttggaatgtgaaatgtgatgaagagatttggttttgtcgtttattttttgtaattttgggtagatttttgtgttttaatttttgagtgaaatagggttttaatagtatttattttatagggttgatgtattaataatgtaatgaagtatttgatgtatagtgaatatttaataaattgtagatattattggtttttaaaatgttttatgattttatgttttaaatttagtaatatattgttgtaaggtggataaagttttaagatattttttttatttatttgatttgtggttttaggaattttttaagtggttataagtaaaagttttaggatgagggataaagtgtgtgtattatttagtgtagtggttttttatttttttggtattagggaagagtttcgtggaagataattattttatgggtcggtggcgacggagggttggttttaggatgaaattgttttattttagattattaagtattagattttcgtaagaagcgagaaatttagattttttgtatgtatagtttataatagggttcgagtttttatgagaatttaatgtttatgttgatttgataggaggtggagtttgggtagtaatgtttgtttattttttgttgtgtggtttagtttttaagaggttatggattagtattagtttgtggtttaagggttggggatttttgatttagtgtgtgcggttttttttttggttattagatttttgtttttagataatattttaaattattatagggtttttaaatatatttatttttgtttttaaattatatttatattttttatttaatttaaatgttgagttaaaagtataaaatgttgatattatgtagttatttttatttttttttttatttttttttttaatttttttaaaaaaaggtaatattttaaattagttttattatgggtgatagatttagggtttttaaatagcgatagtagtggttagaag

SEQ ID NO: 315 - DNA, 1299 bp, Artificial Sequence
  chemically treated genomic DNA (Homo sapiens)
  unsure (1169)
atattaaagttttaaagattttggttttttgttttagttgatttttaagttgtagtatttattaattaatgggttggttcgtttatgttacggggaaaaatatttaaaagaatattattttcgtagaaggtaaaaataaattttttaagtataagtttaaatggggtatgggtaaacgttatttaatcgtagcgatgaaggttattgtttattgagggattacgtagattaattcgaggcgtagttaatttttttagagtaagttcgcggtattcgattttttttttttttttttttggttttttttgacggaagcggaagcggttttcgcgtatattagtcgtttggttttttggtttcggaagttgcgtttttttatttttttcgttggtgttttgttattatggcgttggttgttttgcgggttttggagtttttttcgatcgagatattttcgttggtagtgttgttgttattcgggggttcgtggtcggcggcggagttgggtttggtgttggttttgaggtttgtaggggagagttcggtagggtcggcgttgttggtggtagttttggaggggtcggacgcgggtatcgaagagtagggtttcgggtcgtcgtagttattggttagtcgcgcgttgttgcggtttttggtattgggtttcggggtttgggtgcgggcgcgggcggtgcggcggttttcggcgttaggttgggtattgtttggtatttcgttggggtttgggttcggatcgcgagtcgggtcgttgttggtgaggcgcggagagatttttttagtgttcggatcgcgggtgttggagacgcggtcggcgttgtaagggttgttgggtttagggattcggttggttgtgattgagtttcgcgggcgggttagattgtgtttagagtttggggatagtagtcggtttttattttcgttcgtggtgtttttttttgcggtttttggtatagtgcggcgattttagggagttttgggagggattggagatttattaggggtgagtcggagttgttttcgtggttttggttttttttagggcgaatgggtgtgggtggtttaggttagagagttatcgaatattttatagtcgtatttggttagggtgtaggttttagaatttcgttgggatttttttgatagattgngattcggttttggatcgttgggagagtttttcgttgacggattggcgtttgtttttgttattttggtttttaattttggttgtgattttttggaaatgggagagtttagaatttaggtaggataaaggat

SEQ ID NO: 316 - DNA, 1299 bp, Artificial Sequence
  chemically treated genomic DNA (Homo sapiens)
  unsure (131)
gttttttattttatttgaattttgagtttttttatttttagggggttatagttaagattaaaagttaaagtggtagggataagcgttagttcgttagcgaggggtttttttagcggtttagagtcgggttntagtttattagagaggttttagcgaggttttaggatttgtattttagttaagtgcggttgtgaagtgttcgatgattttttggtttgggttatttatatttattcgttttggaagaggttaaggttacggagatagtttcggtttatttttagtgaatttttagttttttttagaattttttggagtcgtcgtattgtgttagaaatcgtaaaggaggatattacgggcgggggtgggggtcgattgttgtttttagattttggatatagtttggttcgttcgcggagtttagttatagttagtcgagtttttgggtttagtagtttttgtaacgtcggtcgcgtttttagtattcgcggttcgggtattgggagggttttttcgcgttttattagtagcggttcgattcgcggttcgagtttaggttttagcgaggtgttaagtagtgtttaatttagcgtcgggggtcgtcgtatcgttcgcgttcgtatttaggtttcggagtttagtgttaggagtcgtagtagcgcgcggttaattagtagttgcggcggttcgggattttgtttttcggtgttcgcgttcggtttttttagggttgttattagtagcgtcggttttgtcgggtttttttttgtaggttttagggttagtattaggtttagtttcgtcgtcggttacgggttttcgggtggtagtagtattgttaacgggggtgtttcggtcggaaagggttttaggattcgtaagatagttagcgttatggtgataggatattaacgaggagggtgaaggagcgtagttttcggagttagagagttagacgattagtgtgcgcgagggtcgttttcgttttcgttaggggaggttaaagaaaaaggggaggggggtcgggtgtcgcgaatttgttttgagggggttagttgcgtttcggattgatttgcgtggttttttaatagatagtaatttttatcgttgcggttgggtagcgtttatttatgttttatttgaatttgtgtttaaggaatttatttttgttttttacgaaagtaatgtttttttaaatattttttttcgtggtatgaacgaattagtttattaattggtgagtgttatagtttaaagattagttggggtagaaagttagggtttttgaagttttgatgt

SEQ ID NO: 317 - DNA, 3490 bp, Artificial Sequence
  chemically treated genomic DNA (Homo sapiens)
ttttgatggagttttattttgttttttaggttggagtgtagtggtatagttttggtttattgtaattttttttttttgggttcgagcgatttttatgttttagttttttgagtagttgggattataggtgtggattattatatttggttgatttttgtatttttagtagagggggggttttattatgttggttaggttggtgtcgaattcgtgatttcgtgatttatttgtttgagttttttaaagcgttgggattataggtgggagttattgagtttggttttaaatttaatttttattaatatttttattgttatttttttaagtgtagagataattagtaataagtgtaaatttgtttcgtagtatttgattatttttttggtgtaaatattttaaaagtggttgattttaagtaattaatatgatatattgaaggtagagttgggaaaatgtgtagtaatatattattaaataatattttcgtatatagatataatagatataaataattttaaaagtatagataatgataaaatataataaaataattagaaaatgaagagttttgagatttgtattttttgtttttaatataattttattgtaagtttatgtagtaagatttttaataatagtagtgtttaatttttttgttaattatatttttgaaattttagtaattagttattattagttggcgttagtatattatcgattgtaggttttattgatgaggaaattgaggttcggagaggttgttacgaatttgttgtagttatataggaagtattatttaggttgttttaattttaaatttttttttttttatatgtttttttttaaaatataattgatttatttatatgttagtatttaaatattttagtgtgaatggatttatagtttgttgaataaagttattgtttttcggtaggtgggatgggaaatttgattaggcgaaagaataggatgaagggaaaaagaatatttatttaatagtttaggatacggtaggatatttttttttttgggatttgggtaagttaagatttaataattagtaattgtttagtaattgatagaattggtagaatatttattgtttttttaaacgtttgttatttagtatttttttttatatatttttattgtgttaaacgaaaacgttaagatttattttagtagttatagtaaagagtaagtattaataattaagtgagtttttaggagaaaaaaaataaagttattttttaatgtaaatataattcggttaaaggtgtggtttattttttttcgttttattatttttaaataagttatttttgtttttatggattgcgagttagtgattttaggttgtgatattattgtattttagttttaaatttttttttgtaggtagtttgtgggggaaataataaaattagtattttaatattataagtcgtgagatcgtttaggaataattttaatttgtatattggaatttttgtagaagatattttgaatcgttttagatataataggattaggtaaaacggcgttgttttgttagttattgtaggtttttatttgatatagtttttagattttgtttacgaattttttagttggtcgaaggggtcgcggtcgtatatgcgtagttagtttcgttggttgtgcgtttagtttcgtttttagaggcgtcgcgttttttgatagttcgcgggcgtatatacgttgacgcgtaggttgcggtcgcgtaggcgtagtcggggcgttttttcggtataggcgttttttattttagcgtgttttgagtttttggttcgcgaagtgtcgttaggttaagtaggtgttaaaagttcggggtcgtggatttcggttaggttttagtagtatggaggcgtagggtgtagcggagggcgcggggtcgggcgtcgttagcggcgtgttttatttcgcggttttagtttcggttgcggtttttattttggcgttagtttcggtggcggtcgcggttttttaatttattttgttagtgatgtaattttgtgttgggtaggacgaggttgcggttttcgggggtagcgttggggcgggtaagttcgttaggtatttgtgcgaaggggtcggggatggcgaagaggaggttggggaggacgaggcggatttgttagatatttcggatttttcggggggaggcgagagcgcggttagtttggaggatttagaggacgaggagatttattcggggggcgagggtagtagcgggggcgttcggaggcggggtaacggtgggggtagtatgagtaagatttgtatttacgaaggttgtagcgagattacgagttaggtggttaagtagcgtaaatcgtggatgtgtaagaaatatcgtaataagatgtataaggataagtataaaaagaagaagagcgattaggttttgaattgcggtgggattgtttcgattggtagcgcgggaaacgttaaattcgaggtattagatttagttgaggtttggggatgggaggtggaagaagaaattcgattttaacgtaaatcgtatttgtagggtttgtttttttatttttaaatgggtcggtttgtagtgattgggttagtggttgagaattagagtgtttgttttaaattaaagtttatattaatatgtgtaaagtaataatagttttgttgaatttatgataggtgtagaaattttagtaaaaataatgtgatatcggtagagttgttatagatttgggatatggttggaaggatatagagtaaatgatcggtttggtttatcgttaaaggagatttaggaatttagatgaagttggtatttttgagaaagttatttttttttgtttttattattttatttttagtatttagtttttagtatttagtttttagtatttttatttgtaatatttttgtatttagtattttgtttttagtgttttgttttgttaattttttttttagtatcgtatttttagtattgttatatttagttgtttgtttgtagtatttttgtacgtagtattttttttttataattttgtttttagtatttttatgtttagttttttgtttttatgtttttattattttaatatttaatatattttgtttttagtatttttgttgttagtattttgtttttattatttttttttttagtatttttgaggggggaaaaaaaggatgataatggggtataagttttaaaaaatttttggattgtttgatttgaattgagttaaaggtaaaattagtgttttggagttcgatttttgggtgtaaatttttgttgtattttatttgtttttgtggtttgaataggttattaaattttgtaaaatgggtattaaaatcgtgtgttatttatagtgttgttgtgaatatgtgagttattttatattgagggtttatatagtgtttagtaattggttaaagtttgtaaattttaattattattattgttattgttagtggtata

SEQ ID NO: 318 - DNA, 3490 bp, Artificial Sequence
  chemically treated genomic DNA (Homo sapiens)
tatattattaataatgataataataatggttaaggtttgtaaattttagttagttgttggatattgtgtgaatttttaatatggaatggtttatatatttatagtaatattatgaatgatatacgattttaatgtttattttatagagtttaataatttatttaagttataagggtagataagatgtaatagggatttgtatttagaagtcgaattttagaatattggttttatttttgatttagtttaaattaaataatttaaaagttttttgagatttatattttattattattttttttttttttttttaggggtattaagaaaaggggtagtgagaatagggtattaataataaggatattgagaataaagtatattaagtattggggtagtgagaatatgagaataagggattaaatataggggtattgggaatagagttgtaagaaaagagtattacgtataggggtattatagataggtaattgagtatagtagtattaaaaatacggtattaggaagagggttaatagaataggatattaaaaataaagtattaaatataggagtattataaatagaggtattgagaattgggtattgagaattggatattgagaatagagtagtgaaaatagaaagagatgatttttttagaagtattaattttatttaggtttttaagttttttttagcgatgaattagatcgattatttattttatgtttttttagttatattttagatttatgatagttttgtcgatgttatattatttttattgaaatttttgtatttattatgagtttaatagaattgttattgttttgtatatgttggtataaattttaatttagggtaaatattttaatttttaattattaatttagttattgtaaatcggtttatttggaagtggggaggtaggttttgtagatgcggtttgcgttaagatcgggtttttttttttattttttatttttaggttttagttaagtttgatatttcgagtttgacgtttttcgcgttgttagtcgaggtagttttatcgtagtttagggtttggtcgttttttttttttttatatttgtttttgtatattttgttgcggtgttttttgtatatttacggtttgcgttgtttggttatttggttcgtggtttcgttgtagttttcgtaggtgtaggttttgtttatgttgtttttatcgttgtttcgttttcgggcgttttcgttgttgttttcgtttttcgagtgagttttttcgttttttagattttttaaattagtcgcgttttcgttttttttcggagggttcgaagtgtttaataggttcgtttcgttttttttagtttttttttcgttattttcggttttttcgtataggtatttaacgggtttgttcgttttaacgttgttttcgggggtcgtagtttcgttttgtttagtatagggttgtattattagtagggtgaattgagaggtcgcggtcgttatcgaggttggcgttaaggtgggagtcgtagtcggggttagggtcgcggggtggggtacgtcgttggcggcgttcggtttcgcgtttttcgttatattttgcgtttttatgttgttaagatttggtcggggtttacgatttcgggtttttagtatttgtttggtttaacggtatttcgcgaattaaagatttaggatacgttggggtaaaaggcgtttatatcgggaaggcgtttcgattgcgtttgcgcgatcgtagtttgcgcgttagcgtgtgtacgttcgcgggttgttagggagcgcggcgtttttgggggcggggttgagcgtataattaacgggattgattgcgtatgtgcggtcgcggttttttcggttagttgggggattcgtagatagggtttgggggttgtgttaggtgaaaatttgtagtggttggtaaggtagcgtcgttttatttgattttattgtatttaaagcggtttaaagtattttttataggagttttagtatgtaaattaggattgtttttgagcggttttacgatttgtagtgttaggatgttaattttattattttttttataaattgtttgtaaggggagatttgaagttgggatgtagtggtgttatagtttagagttattagttcgtagtttatgaaggtagaggtggtttatttgaaaatagtggagcggagagggatgggttatatttttggtcgagttgtatttgtattgagggataattttgtttttttttttttggaaatttatttgattgttagtatttgttttttgttgtggttgttgagataagttttaacgttttcgtttaatatagtgaaaatgtgtgaaaaggaatattgaatggtaaacgtttaaaaaaataatgaatgttttattagttttattagttgttgggtaattgttggttgttaaattttggtttgtttaaattttaggagagaaaatattttgtcgtattttgaattgttaagtagatgttttttttttttttattttattttttcgtttagttagattttttattttatttatcggaaagtaatgattttatttaataaattataaatttatttatattaagatgtttgggtgttgatatataggtagattagttatgttttaaagagaggtatatggaagggagaaggtttggaattagagtaatttaggtagtattttttgtgtgattatagtaagttcgtgatagttttttcgagttttagtttttttattagtaaagtttgtagtcggtggtgtgttagcgttaattgatggtaattggttgttaaaattttaggaatataattagtagaaaaattaaatattgttattattaaaagttttattatataaatttataataagattatattaaaaataaagggtataaattttaaaattttttattttttaattattttattatgttttattattatttgtgtttttaaggttatttatgtttattgtatttgtatgcggaaatattatttagtggtgtgttattgtatatttttttaattttgtttttagtatgttatgttgattgtttgaaattagttatttttggagtatttatattagggaaatgattaaatgttacgaagtaggtttatatttattgttgattgtttttgtatttaagaaagtgatagtgaaaatgttaatgaagattaaatttaaggttaggtttagtggtttttatttgtaattttagcgttttgggaggtttaggtaggtggattacgaggttacgagttcgatattagtttgattaatatgatgaaattttttttttattaaaaatataaaaattagttaggtgtggtggtttatatttataattttagttatttaggaggttgaggtatgagaatcgttcgaatttaggaggaagagattgtagtaagttaagattgtgttattgtattttagtttgggaaatagagtgagattttattaaaa

SEQ ID NO: 319 - DNA, 3007 bp, Artificial Sequence
  chemically treated genomic DNA (Homo sapiens)
ttttttttttttttgttttttattttttttttttttttatcgtaaatttcgttttttgaggttagatattttataaatttttatatgttggttttcgaattgtgattttttttttaaattttttttttatggttatttttttagacgtttatttttgtttttttttcgtttaggggggcgggggtaggggaaaggaaaataatataattttaggggaagtcgtttttaggtttgttgtttttttattttttttttttaattaaaaaaaaaaaggatatagaaaatattagttttgaatttttttttaagaattcgggttgtaaaggaaattttttttgtttttgttatttatgtgttgttaagttttgaagtggtgagttttaggtcggttttgttaattttatttagtaaaattgtagtgtttttgtttttagatagtattttgtttttttgtttttttaaaaggttatagtgaaagtttggtttggatcgtgtcggttatatggaatggataagggtataattttaaaatgtgattatggggttgtgtgggggcgaaggaggcgatttagttagaaatttattgaaaaggatttcgttttgtaaaaaatcggtttttaaaaaattagaatttcgagattttttttttttttaaaggaaataattgttgttattgagtttattgttttatttagtaattattatatatggttttagtttatgggtagataaatgggatttttagaaagtagtttgttttttgtgtggtaattagatattgtattaaaatgggttgtaacgtgtaatttaaaagaaattttttagtttggtatttgttgagattatagttagtttttgttgttgttatttaagtaggtttgttggaggttgttttttttaattttaaattgaggtttggtgaattttagttcgggtatagagttaaaatgagtaaattgggtgttttatgcgtatttaattttggtttgtaatgtaaagttttttatattacgatttagtgtttaatagatgtttataggtgggtatttaaaggatagtattttatgatttatgtgatattttagattgttaatatattaaattataatgtatcgtttttatttgttgtatagatattagtgttgttaagtttaatgattatttaatatgttttatagtatgtattatgatgttgtgggttatatatttataattttgtttgttattatattgatttagggttaaaaattttttttttttaaatatatgttttaaaaattattttttgttttaggataaggtattaattttagaaaaagttttgtgatatttatatgaaacgttataaagagtgttttgaataagttaataattatttttttttaattttggttttagattgtagtttaatataatggaaaagagtaattttgttaaaaagtggtttaaaaaggtatatttattgttaatgaattttataattaaaaatagatgggatttttattaacggtaaatttttagtttttagtgtgttattttggagtataaagataaatagttattaattttttttaaattttatagttttttaattggtatttttaaggttgtttttaaatttttagattaatattgttgtttttttttttttgattatatggtaagaagtaggttatggttaaatagaagaaaaaatatttatagaaaagttatgttaatataaattggtttttaataaatttagatttaaatagttttagtgtaagaatttataataaaaataagttatattaaattattagatagttaggaaaaatggtaattattttttttggtttttttaaatatgatttttttagttttataagtttaatattttaaatattattaaagtttataaaataattttatttatttgtttttattaattttaattaaaattatattttaaaaatgattttgatattgtttaattattttattataaatgatgggaaaattgatgtttaatatataattgaaaataattatttgttaatttttttgaagttaattataatgttaatgttattgtatgttgaggttatttttgaatattggatattttgttttattagtattattaaggttttttgtttgtgttttttttttttttaattgagtttggtattttaatttaatgtgtatattacgaagtgtatttaattttttaaaaatatttattgttaatagttttttattattaatggatatttaaatattgattttaaaatatatgagttttaatgtattagtacgttggatatttgaaaattttttatttttttttgtttttttaggggtaaattgatttaattatatttttggtttaaaatttgattaggtttgttatataatttttggaattttgatagtagaaaattttttttatgtattaatttataaaagttaatgggagtttaaaaagtagttagatgttagttatttttttttgagatggtttatgttttttttataagaattaatatatatatatatataaaatgtatgtatataatatatatatattagatttttaatattttgaattatgattatttttttattatttattatagtgtttttgttgtattttgtaatgtgtttttaattgttaaaaattgggattacgtaaatgtaatttgttgttttttttatagttatatttgtaataatttttgttttaaaagtaagtttatttttttttatttagtttttttataggttagttatttttttatttatgtgtattggtatagtttttatagattattttgttaatttgaataagaatgtaatgttattatttagaaatatagtaatatttgtattatatttagataggttattttataaatatattatatttgtggagagatatttagagttaaaatatttatataggatatatatatatacgtaggttttcgtttaattataacgtgttttttttttaaattttggtagg

SEQ ID NO: 320 - DNA, 3007 bp, Artificial Sequence
  chemically treated genomic DNA (Homo sapiens)
tttgttagaatttaaaaagaagatacgttatagttgggcggggatttacgtgtatatatgtgttttatgtaaatgttttagttttagatatttttttataaatataatgtatttgtaaaatggtttatttagatatgatatagatgttattatatttttagatgatagtattatatttttatttaaattaataaaatgatttgtggaaattgtattaatatatatgaataaaaagataattggtttataaaaaaattaagtggggaaaaatgggtttatttttagaataagaattattataagtatagttataaagaaaatagtaaattgtatttacgtagttttaatttttaataattagaaatatattataaaatatagtagaaatattataataaatgatggaaagatgattatagtttaaaatattagaaatttaatgtatatgtattatatgtatatattttatatgtgtatgtatattaatttttatgaaaaaaatataaattattttaaaagaaggtaattaatatttaattgttttttaaatttttattggtttttgtaaattaatgtatagaaaaagttttttattattaaagttttaagagttatgtgatagatttagttaagttttgggttaaagatgtgattggattagtttatttttaaagaaataggaagaagtgaagggtttttaaatatttaacgtattgatgtattaaaatttatgtgttttagagttagtatttaggtgtttattagtaatagagggttgttaataataaatatttttaaaaaattgaatatatttcgtgatatgtatattaggttgaagtgttaagtttaattaaaaaaaaaaaaaatataaataaaaaattttgatgatattggtaaaataaaatatttagtatttagaaataattttagtatgtaatggtattaatattgtaattaattttaaaaaaattaatagataattatttttagttatatattagatattaatttttttattatttatagtaaagtgattagataatattaaagttatttttaaagtatagttttaattagaattgataagaataggtaagtagaattattttatgaattttgatggtatttgaagtattgagtttatgaaattaaggggattatatttaggaaaattagagagaataattattattttttttagttgtttagtaatttgatatagtttgtttttgttgtaaatttttatattggagttatttaaatttggatttgttgaaagttagtttgtattagtatggtttttttgtaaatatttttttttttgtttaattatagtttattttttattatataattaagaaaaggggggtagtaatgttaatttggaagtttaaaagtaattttaagaatgttaattgaagaattataaagtttgagaaaaattaatggttatttatttttgtattttagagtggtatattgagaattaaaggtttatcgttgatagaggttttatttgtttttggttatgaggtttattaataataaatgtgtttttttaaattattttttagtaagattatttttttttattatattaaattgtagtttaaagttaaaattagaaagagatgattattaatttatttaaaatattttttataacgttttatgtggatattatagagttttttttgaaattggtgttttattttagagtagaagatgatttttaaaatatatatttggaaaagaaaaatttttagttttgagttaatataatagtaaataaagttatgggtgtgtagtttatagtattatagtgtatgttataaaatatattaggtgattattaggtttaataatattagtgtttgtatagtaaatgaaagcgatatattataatttaatgtattgataatttaaagtattatataggttatgaaatattgttttttgaatatttatttataagtatttattaaatattaagtcgtggtgtaaaaagttttatattataaattaaaattaaatgcgtataaaatatttaatttatttattttaattttatgttcgggttaaagtttattaaattttagtttgggattgaaaagagtaatttttaataggtttgtttggatgatagtagtaggaattaattatggttttaatagatgttaggttgaagagttttttttgagttatacgttataatttattttagtgtaatgtttggttgttatatagaaagtaagttattttttgaaaattttatttatttgtttataaattaagattatatatgataattattgaataaaatagtgaatttagtaataataattattttttttaaaaggaaagaaaatttcgaaattttagttttttaggaatcgattttttgtaaagcgagattttttttaatgagtttttagttggatcgtttttttcgtttttatataattttataattatattttaagattgtgtttttatttattttatatggtcggtacgatttaggttaagtttttattgtgattttttaaagagataaagaagtaaagtattatttagaaatagaaatattgtagttttattgagtgaaattagtaaaatcgatttgaaatttattattttaaaatttgatagtatataaataataaaaataaaggagattttttttgtagttcgggtttttgaagagaagtttaagattgatgttttttatgttttttttttttttaattaaaaaaaaaaaataaaaaagtagtagatttgaaggcgattttttttgaaattgtattattttttttttttttattttcgtttttttaagcgggggaagggtagaaataaacgtttagaagagtagttatgagaaaggggtttaaaaaaaaaattataattcgaaaattaatatataggggtttgtaaaatgtttaattttagagaacggggtttgcgatggggaggaggggagagtgggaagtagggaggaggaaga

SEQ ID NO: 321 - DNA, 9095 bp, Artificial Sequence
  chemically treated genomic DNA (Homo sapiens)
taagaggaattttttttagttagaaggtgttgaaagatagagaaaggaaatataaatatgttgttatttgttagtttaaaattttgagaattatttttaattttgttaataatttatattttattaataggatattattaatattttttaatgtagttaattaaaatttgtttaatttttattgatttgtttaaaaattatgttttttttttttagttttaagatttttttttatttgggagagtaagtggggaagagagggagatttttatgattgagaaagggtgaaatagtttttagtagataattattatattatataaatatagattgtttttagttgatagtgtttcgatttaggattttttaaatgttacgatcggtttattggggtatagagtgtatttttgatttacggtgggtatattgggatgtagtttatcgtaaagatgagtatattatttgtatatttttatgttttttagttttaaagattattaaatatgaatatatttgagaaattatttaatttagttgggggtggtggtttattttataattttagggatttaggaggttaaggtaggaggattatatgaagttaagagtttaaaaatagtttaggtaatatagtaagattttttttttataaaaaaaaattaaaaaaatagttatgcgtggtggtatgtatttgtagttttagttatttgggaggttagggtaggaggattgtttgaatttaggagtttaaggttgtattgggttgtgattatattattgtattttattttgggtaatggagtgagaatttgtttgaaaaaaaaaaagaaattgatttaattttttattttatgtcgtattatatatgtatttttgtgtttttagatttttaattttggtaatatattttataattgtagagaatagtgttttgtgttaatagattagttttggattattttttttataaaatgtttatattttagttttattaaatatataagtttttttatttagattgttatattttatattgggttagatgagaaaaagtataatttaaattgattttttttttttaaatttagtaattgtttgaattgtttaatttattttaagaatagatatttatttgtttttttttttttttttttttgatttgtttgtgttgattatatagagaatagtataattgtttgattttttgttttttatagttcgagtgattgatgtatttaatgggaaagtttatgttgttgaaagttgtttggaagaaataggtggtttgggagtagatattgttttagatgttggaggtaggtattttatgaaattagtagtttgtgtagtttttttagtttgatgaatttaagaaaaaaaatttaattagggtataattattaatgtatttattaaattagatgtttagttttaggttttgtttttaattgaagattttttaatttaaattggaatttttattttatttttattgtaagcgttgtatgtaagagagaatatgtttattttttatagcgtagattaggggtgtttaattttttggtttttttggttatattggaagaagaattgttttaggttatatataaaatatagtaatattaatgatattttatgagttaaaaaaaaaaaaaaaaatttaaaaatgttttataatgttttaagaaagttacgaatttgtgttgggtagtatttaatgttattttgggtaggttgcgagttggataagtttggtgtagatattagagtaataaatgatatatcgttataagaaatttagaaatatggtttttttagtggtttttagaaaatatagtattatttttatgtttttttagttttatttgttgtgtgtggttgttttcgattggatagttgatttttgtagtttttatttggaaaatattaaaatttgttttagttttattttttttgaatgtttttagtttaattagtatttatttaatatttattttgaatatatttaagtaatagtatgatttttaaaggataggttttacgagtttgtaaagtgtttttatttatattttggtaggatttattttttaatgtgagaattatggatgaatatggttatgattatagtgtggttttttaaattagtattttttaagatttgaaaatagtttaggaaaatttgttagtggaagtaaatatatattttattgtattatttttttatatggatattttagtaattatgttaagattattttgagtttatgagttttttaattgggaattaatttattttattatattaagttattagtgttaattgttagatttggttatgtgttatattattttgtttggtttttaaatgaagatagattttttatttttatttatttttataataagtagatttataataaattataattaaatgttgaataaattttatgattagtttaatgtaaaaagtagattttaaggtattagaatatattgtgtgttgttttttttaagaaaaatatttttttatttgtatattaaaaagtaaggagggttgggtgttgtggtttatgtttgtaattttagtattttgggaggtcgaggcgggcggattacgaggttaggagattgagattattttggttaatataatgaaatttcgtttttattaaaaatataaaaaaaaattagtcgggtatggtggcggcgtttgtagttttagttatttaggaggttgaggtaggaggatggcgtgaattcgggaggcggagtttgtagtgagtttagatcgcgttattgtattttagtttgggcgatagagcgagatttcgttttaaaaaaaaaataaaaagagagtgtcggcggatatagtggtttgtgtttgtagttttaattatttatgaggttgaggttggaggattgttggagtttaggttagtttgggtaatatagtaagattttgtttttaaataaataagaatttgtttgaagaataaatttttgttagattattataaaatatattttttttttttttttttttttaaaattatttttttgtaagtgagattatatagtaaagatgatgaattagttgtaaaattataattattattatataaatatgatattattatattttttggtgttggaggttattgggtaataatagaagaaaatttttaggtattattagaaattataaagcgttattattatattaaaggggtgtaattaataaataataatgtttaagttatttgaggtaaggtatgattaaattagtataaaatttgggttaggtatggtggtttatatttatgagtttagtattatgggaggtcgcggcgggcggattatttgaggttaggagtttaagattagtttggttaatatggtgaaattttatttttataaaaaatataaaaattagttaggtatggtggtataggtttatatttttagttttttgagagattgagggttgaggtatgagaattatttgaatttgggaagcggaggttgtagtgagtcgagattgcgttattttatattagtttgggttatagagtgagattttgttttaaaaaaaaaaaaagaaaaaaatttgaaaaataaagaaatttagttttttttttttattttatattttatattagaaagaaatgtagtttttttttttattttagtaatatgttggttaaaatgttgaaatattgtttagtagagatatttttttaatgacgatgaagtgtaattttatttagtgatttagatatgtgatttacgaatttattttattttatttttttatttttttattttttggaataaagtttcgtttttgttgtttaggttggagtataatggtatgatttcggtttattgtaatttttgttttttaggtttaagcgatttttttgttttagttttttgagtagttgggattataggcgttcgttattacgtttagttaatttttgtatatttagtagagatagggttttattatgttgattagggtggttttgaatttttgattttaggtgatttatttgtttcggttttttaaagtgttgggattataggtgtgagttattacgttggtatgaatttttaatagtattttagatagtattttttttcggtgatattgttgatatatatttagtaaaatatttttatataaaattattataattttttaattatttaaattggaattattatatatgtttatgtattttttaaggttatattttttagtattttagttatatatttatatgatggttgatatgtaaatatcgtaatttttatttattaatttttattgattttttaatatttttatgaagatggttagaaaagatatatatatatttttattattttattattaggattttagattggttttgtatttgttatgtatttattatttcgttgttttattattttggattatgaaatagaaaatattatcgtttacgttattaaagtttatgtgtatatttttgtgatttggatattatttaatttgtgtagaagtttttttgattcgagatattagttattttgttgttaaatttataataattgattagtttttgttttattttatttaagttggattttttagatagttattgttttttttttaagggagtaacgttagtttttttgaatgatgaagtttggaatttgttaaatgtataatagggaaaatatttttatattttttttatcgattgattgagtttttggtttgaattttgtattgtattaagtttttttattacgataataggaaataataatagtagttaagtttttttaagtattttaaatagtattttaagtgttttgtaagtatttatttaaatattaaaatagttttttgagatgtaagtattgttattatttttattttataggtgaagaaatagaagtatagagatgttgatatagatttaaggacgtagtaagtggcggagtaagaattatatttaggtagttttttttttttttgaatagagatgagttttaagatatttggaagattttgtttttaattttatattaaggaaagtatatattattttgaaaggttgtatatttatttttatgatggtgttattgtatagaaatattttagaatatttttttaaattaaagagtttgtggagtgttttataaatattaatgttaggaaatttttattaaatgaagataggtttgattttttgaaataaaagttatttagagataagtttggtgtgattgaagttaaattattttagttgagtaaaaataataaaaagtttggaatatataaataattttaaaaagaaaggtgtaaatttttttagagtagggttaatttaagaattttttttatttttaaaatgattggtttagaggtagtagtatttggtaaaagttttaatgtattggataaaaaaaaagttattattatttgatagagtatatgtgtgtgtttgaagaaagatttatatagttttatatttttttttattgaatattatacgttattttttttaaatgtgtttagttatatatgtgtgatatgtataaaggttagttttttttaggagtaatgatagtttttattcggagttttaaggtagttatgtaggtcgggtatggtggtatatgtttgtaattttagttatttatgaggttgaggtagaagaatcgtttgaatttgggaggtagaggttttagtgagttaagattgtattattatattttagtttggtgatagagtgagattttattttaaaaaaaaaaaaaaaaaaaaaaagttacgtaattagtatattgtatgtgttaagttttaaggagtagattttaaaatttttttatgtagtgaatgtatgagtttaaagttatttttgattaaatattttttattaaatttgaaaattagatttaattttttaaaaggatttttaattaattttattttttaaaaaggtatatgagttggtatagtggtttatgtttgtaattttagtattttgggaggtcgaggtgggggattacgaggttaggaaatcgagattattttggttaatatgatgaaatttcgtttttattaaaaatattaaaaaaaaaaaaattagttgggtgtggtggtatacgtttgtagttttagttattttagaggttgaggtaggggaattgtttgaatttaggtagtgaaggttgtagtgagttgagatcgcgttattgtattttagtttagttatagagcgagattttgttttaaaaaaaaaaaaaaaagtaaatgtttaatttaataatattgtaattattaagaataatatggaatgatgttatagtggagaatattatgtggttattaaaagtaatagttaataaaagtaatattagttaaggttagaatattatgtagttattagttttgattttttttttttttttttttttttttttgagatagagttttatttttgtttaggttggagtgtagtggtatgagtttggtttattgtaatttttaatttttgggtttaagtaatttttttgttttagttttttgagtagttgggattatagatatgcgttattacgtttggttaattttttgtattttttagtagagacggagttttattatgttggttaagttggttttaaacgtttaattttaggtgatttatacgttttagttttttaaagtgttgggattataggtatgggttattattttcggttgtagttattagttttgaattttatatgttggaaattagattgttttgtttatagtatataatttaatttttttaaattatttttttcgatgagaaggtaattttaatttatttgataaatttttggattaagttgaaatatgatatgtgtatatgaaatattgtatattttttagaattagaaatatatgttttgtatataggtaagaattttattaatagtagtaggaagggaatttgtagggatgtgaattagtaaatttatattttttagtttttttttaaaaatatttttaggttaggtgtggtggtttacgtttgtaattttagtattttgggaggttaaggtgggcggattacgaggttaggagattgagattattttggcgaatatggtgaaattttttttttattaaaaatataaaaaattaattaggtatggtggcgggtatttgtagttttagttattcgggaggttgaggtaggagaatggtatgaatttaggaggcggagtttgtagtgagtcgaggtcgtgttattgtattttagtttgggtaatatagcgagatttcgttttaaaaaaaaagaaatgttttaaatgatttatatttgttaatttgtattttttttttttttttttttttttttttgagatagagtttcgttttgttattaaggttagagtgaagtggcgttattttagtttattgtaatttttgttttttaggtttaagtaatttttttgttttagttttttaagtagttgagattataggcgtatgttattatgtttatttaatttttgtatttttagtagaggtaggattttattatattggttaggttggtttcgaatttttgattttaggtgatttatttgttatagttttttaaaatgttgggattataggcgttagttatcgtatttagttttaatttgtattttttaaagttttgaattatatagtagtttttatttgtgtaaattttttttatttagtttatataagttaagttgttgtttgtgatttaatagagatatttttttttaattgtgttattttgggttataaataatttagaagtacgggtaattatatagaattttgattttagtattataattttaattaaattagtaagatagattttttttttgatttttatattattttttgatttttttagtgatatacgattagttttttgtatttgagggttttatatttagggatttaattaattaaggattaaaaatatttggaggttgggggtagtggtttatgtttgtaattttagtattttgggaggttgaggtaggaggatggttttattttaggagtttgagattagttcgggtaatatagggagattttgtttatataaaaataaaaataaattaatttggtgtggcggtgaattgttgtggttttagttatttgggaggttgaggattattagagtttgagaggttgaggttgtagtgagttatgattatgttattgtattttagtttgggttatagagggggtttttgttttaaaaaaaaaaaaaaaaagttttgaaaaagtaataatacgataataaaaaaaataaaaaaaatagtataattattatttatatagtatttatattgtattaggtattataagtaatatagagatgatttaatgtataatggagatgtgtttcggttatatgtaaatattaggttatttttttttttttttttttttttttttttttgagatagggtattgttttgttgttttggttggagtgtagtgtttattttagtttattgtaattttaaatttatgtgtttaagggatttttttgttttagtttttttagtagttggggtaataggtatatgttattatgtttggttaatttttaatttttttgtagagagttttgttttttaagttgttgtattattttttataagggatttgagtatttggagattttggtttttatgggggttttggaattaattttttatggatgcgtgagggatgattgtatattatatatatataaagtttattggtttttgtaaataaattttgagtttattaattaattagtttggttaacgaatgtatatttaaagtaagatatatacgtgttaaaattgtttttaattaaaaatgttatatgtagtgtagaaatgaaaattagatattattttattcgtatttattgagataatagtggtgagtatttaggataagtattaggtttgatttgttgtttttgttatttgtttttggaaatttaggttttattatattattaatttttaaattatttttttgttgtaga

SEQ ID NO: 322 - DNA, 9095 bp, Artificial Sequence
  chemically treated genomic DNA (Homo sapiens)
tttataatagggaaatgatttgagagttggtggtgtaatagagtttaaatttttaaggataagtgataagagtagtaagttaagtttggtgtttattttaagtgtttattattattattttaatggatgcgaatgaaatagtgtttagtttttatttttatattatatatggtatttttagttaaaaataattttagtacgtatatattttattttagatgtatattcgttgattaggttggttggttaatgggtttaaaatttgtttgtagaagttagtaaattttatgtgtgtatgatatatagttattttttacgtatttatgagggattggttttaggatttttatgaagattaaaatttttagatatttaagttttttatagaaaatagtgtagtagtttgggaaataaggttttttataaaaaaattaaaaattagttaggtatggtggtatgtgtttgttgttttagttattggggaggttgaggtaggaggattttttgagtatatgggtttgaggttatagtgagttggaatgagtattgtattttagttagggtaatagagtaatattttgttttaaaagaaaaaaaaaaagaaagaaaaaaaaaatggtttagtatttgtatataatcgaggtatatttttattatatattaagttatttttatattatttataatatttaatgtaatgtaaatattatgtagatagtggttatgttattttttttgttttttttattgtcgtattattatttttttagagttttttttttttttttttgagataggggttttttttgtggtttaggttagagtgtagtggtatgattatggtttattgtagttttaattttttaggttttagtgatttttagttttttaagtagttgggattatagtaatttatcgttatattaggttaatttatttttatttttgtatagatagggtttttttatgttgttcgggttggttttaaatttttgagatgaagttatttttttgttttagttttttaaagtgttgggattataggtatgagttattgtttttagtttttaaatatttttgatttttgattggttgaatttttggatgtggaatttttagatatagggggttgatcgtatgttattaagagaattagaaaatgatgtaaaaattaaagaaaaaatttattttgttaatttaattgaaattataatattaagattaagattttatgtaattgttcgtatttttgaattatttatggtttagaatgatatagttggaaggagatgtttttgttaaattataagtagtaatttagtttgtatgaattgaatgaggagggtttgtataagtgaggattattgtatgatttaggattttagaaaatgtaaattagggttgggtgcggtggttaacgtttgtaattttagtattttgggaggttgtagtaggtggattatttgaggttaagagttcgagattagtttgattaatatggtgaaattttgtttttattaaaaatataaaaattaggtgggtatggtggtatgcgtttatagttttagttatttgggaggttgagataggagaattgtttgaatttgggaggtagaggttgtagtgagttgagatggcgttattttattttagttttggtgatagagcgagattttattttaaaaaaaaaaaaaaagaaagaaagaaaatgtaaattagtaaatataagttatttaaaatatttttttttttttgagacggagtttcgttatgttgtttaggttggagtgtagtggtacgatttcggtttattgtaagtttcgttttttgggtttatgttatttttttgttttagtttttcgagtagttgggattataggtgttcgttattatgtttggttaattttttgtatttttagtagagaaggggttttattatgttcgttaggatggttttaattttttgatttcgtgattcgtttattttggttttttaaagtgttgggattataggcgtgagttattatatttggtttaaaaatatttttaaaaggaaattaaagaatataaatttattaatttatatttttgtaagttttttttttattgttgttaataaaatttttatttgtgtgtaaagtatgtatttttgattttggaaaatgtatagtattttatatatatatgttatgttttaatttggtttaaggatttgttaaataggttaaaattgtttttttatcgggagaggtggtttgagagaattaagttatatattataagtagagtagtttagtttttaatatgtaagatttaaaattaatagttatagtcgggagtggtggtttatgtttgtaattttagtattttgggaggttgaggcgtgtggattatttgaggttaggcgtttgagattagtttgattaatatggtgaaatttcgtttttattaaaaaatataaaaaattagttaggcgtggtggcgtatgtttgtaattttagttatttaggaggttgagataggagaattgtttgaatttaggagttggaggttgtagtgagttaagtttatgttattgtattttagtttgggtaagagtgagattttgttttaaaaaaaaaaaaaaaaaaaaaaaaaaaattaaaattaatagttatatagtattttaattttaattaatgttatttttgttaattgttatttttaatagttatatggtattttttattgtagtattattttatgttatttttaataattataatgttattggattggatatttatttttttttttttttttgagatagagtttcgttttgtagttaagttggagtgtagtggcgcgattttagtttattgtaatttttattgtttgggtttaagtaatttttttgttttagtttttggagtagttgggattataggcgtgtgttattatatttaattaatttttttttttttggtatttttaatagagacggggttttattatgttagttaggatggtttcgattttttgatttcgtgattttttatttcggttttttaaagtgttgggattataggtatgagttattgtgttagtttatgtatttttttaaaaaatgaaattaattaaaaatttttttagaaagttaaatttaatttttaaatttaataggaaatatttaattagaaataattttaaatttatatatttattatatgaaggggttttgaaatttattttttaaaatttaatatatgtagtatattaattacgtaattttttttttttttttttttttttgagatggagttttattttgttattaggttggagtgtagtagtgtaattttggtttattgaaatttttgttttttaggtttaagcgatttttttgttttagttttatgagtagttgggattataggtatgtgttattatgttcggtttatataattattttaaagtttcgaataaagattgttattgtttttggagggaattggtttttatatatattatatatatatgattagatatatttaagaaaagtaacgtatgatatttagtagagagaagtgtaaggttatgtaaatttttttttagatatatatatatgttttattaagtaatgataattttttttttatttaatatattaaaatttttattaagtgttgttgtttttaagttagttattttagaaataaaaggaatttttaagttgattttattttaaagaggtttgtatttttttttttgaaattgtttgtatattttaaattttttattatttttatttaattggaatgatttggttttaattatattagatttatttttgaatgatttttgttttaaaaagttaaatttatttttatttgataaagattttttagtattgatatttataaaatattttataaattttttaatttagaaaagtattttgaaatgtttttgtgtaatggtattattataggagtaagtgtgtaattttttaaggtgatgtgtgttttttttaatgtgaggttaaaaataaaattttttaggtattttagggtttatttttgtttagaaaggagagagattgtttgagtgtgatttttgtttcgttatttgttgcgtttttgagtttgtattaatatttttgtgtttttgtttttttatttgtgaaatggggatgataatagtatttatattttaaaaggttgttttaatgtttaaatgaatatttgtaaggtatttggaatattgtttggaatatttaaggaaatttaattgttattattattttttattatcgtaatgaaagaatttagtatagtataaagtttaagttagaaatttaattagtcgataaaaaggatataaagatattttttttgttgtatatttgataaattttaaattttattatttaggaaagttaacgttgtttttttgaggaaaaggtagtggttatttggaggatttaatttggatagaatgaaataaagattaattaattattgtgagtttaatagtaggatgattggtatttcgagttagaaaaatttttatataaattaaatgatgtttaaattataaaaatatgtatataaattttaataacgtaaacgataatattttttattttatggtttaaaatgatgaaatagcgaggtgataagtatatggtagatgtaaggttaatttagaattttggtggtgaagtggtaggggtgtgtgtgtgttttttttggttatttttatgagggtgttggaaaattagtgaagattggtaggtgagaattacggtatttgtatattagttattatgtaaatatgtaattagaatgttgaaaaatataattttgagagatatataaatatatatagtaattttaatttgaataattaggaaattgtgataattttatatagaaatattttgttaagtatatgttaataatgttatcgagaaaaaatgttatttgaaatattattaaaaatttatgttagcgtggtggtttatatttgtaattttagtattttgggaggtcgaggtaggtggattatttgaggttagaagtttaagattattttggttaatatggtgaaattttgtttttattaaatatataaaaattaattgggcgtggtggcgggcgtttgtaattttagttatttaggaggttgaggtaggagaatcgtttgaatttgggaggtagaggttgtagtgagtcgagattatgttattgtgttttagtttgggtaataagagcgaaattttgttttaaaaaataaaaaaataaaaaaataaaataaaataaattcgtaagttatatgtttaaattattaaataaaattatattttatcgttattgaaaggatgtttttattaggtagtattttaatattttggttaatatgttgttaaagtgaaaaaaaaagttatatttttttttgatataaaatatggaatggaaaaaaaaagttaaatttttttattttttagatttttttttttttttttttttgagatagagttttattttgtgatttaggttggtgtggagtggcgtaatttcggtttattataattttcgttttttaggtttaagtaatttttatgttttagtttttagttttttaaggagttgggaatataagtttgtgttattatgtttggttaatttttgtattttttgtagagatggggttttattatgttggttaggttggttttgaatttttggttttaagtgattcgttcgtcgcggttttttatagtgttggatttataggtgtgagttattatgtttggtttagattttatattaatttagttatattttgttttaaataatttaggtattattgtttgttaattatatttttttggtgtaatggtaacgttttatggtttttgatagtatttgaaggtttttttttgttgttatttagtggtttttaatattaagaagtgtgatgatattatgtttatgtggtagtagttgtagttttatagttggtttattatttttattatataattttatttgtaagggaatagttttaaaaaaagagagagagaagaaatatattttataataatttgataaaaatttattttttaaataagtttttatttatttagagataaggttttattatgttgtttaggttggtttggattttagtaattttttagttttagttttatgagtagttgggattataggtataggttattgtgttcgtcggtattttttttttgttttttttttgagacggagtttcgttttgtcgtttaggttggagtgtagtggcgcgatttaggtttattgtaagtttcgtttttcgggtttacgttatttttttgttttagttttttgagtagttgggattataagcgtcgttattatgttcggttaatttttttttgtatttttagtagagacggggttttattgtgttagttaggatggttttaattttttgatttcgtgattcgttcgtttcggttttttaaagtgttgggattataggtatgagttatagtatttagttttttttattttttaatgtataaatgaggaaatattttttttagaaaaagtaatatataatgtattttgatattttaaaatttattttttgtattaaattgattataaaatttatttaatatttaattgtaatttattgtaaatttatttattatagaaataaataaagataaaaagtttatttttatttgaaaattaggtaaagtaatgtaatatataattaaatttgataattaatattgatagtttaatatagtgagatgaattgatttttaattaaaaaatttatagatttaagatagttttaatataattattgaaatgtttatgtgaaaaaatgatgtaataaagtatgtatttatttttattgatagatttttttgagttatttttaaattttagaaaatattggtttaaaaaattatattatagttataattatatttatttatgatttttatattagaagataaattttattaaagtataaatagaagtattttgtaggttcgtaaagtttattttttagaagttatgttattatttaagtgtgtttagagtaagtgttaaataaatattggttaaattaaaaatatttaagaaaagtgaaattggaataaattttgatattttttaaatagagattgtagaagttaattatttaatcgaaggtagttatatatagtagatgggattgaaaaggtatgagaatgatgttgtgttttttgggagttattgaggaggttatgtttttagattttttgtagcgatatgttatttgttattttaatgtttatattaagtttgtttaattcgtagtttgtttaggatggtattaaatgttgtttaatataaattcgtaatttttttaaaatattataagatatttttgagtttttttttttttttttggtttataagatattattagtgttattgtattttatgtgtggtttaagataattttttttttaatgtggttagggaagttaaaagattggatatttttagtttacgttgtaaaagataagtatgtttttttttatatatagcgtttataatgagaataaagtggaagttttaatttaaattaaaaagtttttagttaaaaataaaatttaaaattgaatatttggtttaataagtgtattaataattatgttttggttaaatttttttttttaaatttattaaattaaaaaaattatataggttattaattttataaggtatttatttttagtatttaggataatatttatttttaggttatttgttttttttaaatagtttttagtaatatgaatttttttattagatatattaattattcgggttgtaaaggataggaaattaggtaattgtattgttttttatgtgattaatataaataaattagggaaaaagaaaaagaaaagtaaataaatatttatttttgaaatgagttaagtaatttaaataattattgaatttaaagggagaaagttaatttaaattatatttttttttatttaatttaatatgggatatagtagtttaaatgaagagatttgtatatttaataaaattaaaatgtgaatattttgtggagaaggtgatttaaggttggtttgttgatatagagtattattttttatagttataggatatgttgttagaattaggaatttgaaaatatagaggtatatatataatacgatatgaaatggaagattaagttagttttttttttttttttagataggtttttattttattgtttagaatggagtgtagtggtgtgattatagtttagtgtagttttgaatttttgggtttaagtaatttttttgttttagttttttaagtagttaggattataggtatatgttattacgtatggttatttttttaatttttttttgtagggagagggttttgttatgttgtttaagttatttttgaatttttggttttatgtgatttttttgttttggttttttaaatttttgggattatagggtgagttattatttttagttagattaagtagttttttaagtatgtttatatttaatagtttttagagttaaaaaatataaaaatatatagatgatatgtttatttttacgatgggttatattttaatatatttatcgtaagttaaaaatgtattttatattttaataaatcgatcgtaatatttaaaaaattttaaatcgaaatattgttagttggggatagtttgtatttgtataatatggtaattatttattagaggttgttttatttttttttagttatagaaattttttttttttttttatttatttttttaaatgaagaaaaattttaaagttaaggaaaaggagtatgatttttaggtaagttagtaaaaattaaatagattttaattggttgtattaaaggatattagtagtattttattaatagaatataaattattgatagaattaaaaataatttttagaattttgaattggtaaataataatatgtttgtattttttttttttattttttaatattttttagttgaagagaatttttttta

SEQ ID NO: 323 - DNA, 14708 bp, Artificial Sequence
  chemically treated genomic DNA (Homo sapiens)
ggttgtatttttttgtttttatttttttgttttttttatttgttttagtttggttatattagtattttgggttttttgttttgtgtttgtttgtttgtttgtttgtttgtttgtttgttttgggatggagttttattttgttatttaggttggagtgtagtgatatgattttggtttattgtaatttttattttttgggtttaaatgatttttttgttttagttttttaagtagttgggattataggtatttattattatatttagttaatttttgtatttttgtagagatgaggttttgttatgttggttaggttggttttaaatttttgattttaggtgatttgtttattttagttttttaaagtgttgggattataggtgtgagttattgagtttagtttgttttgttgttttttgagatggagttttattttgtcgtttaggttggagtgtagtggtataattttgtttgattgtagtttttattttttgagtttaagagatttttttgttttagttatataagtagttgggattataggcgcgtgttattatatgcgtttaattttggtatttttagtagcgatggggttttgttatattggttaggttggtttcgaatttttggttttaagtgatttgtatatttcggttttttgagtagttgggattataggcgtgagttattatgtagggtttttttggttttttaacgtataaagttattttttagttttgggtgtttatagtattattgttagtttttggaaagttttttttagaagtttttatatgattgattttttatttttttttaggttttagtttaaatgttttttttttagagagtttttttttgattattttatgtaatgtgtttttttttagttagtttttttttattttgtgtattttttttagagtatttattattattttggttttgatgtttgttggtttatatgtttgttgtttgttttttatatagaaagtaaattagttttttatttgttttgtttattattttattttagtatagtgattaatatatattagtagttaattaataaatagttataagttaggtacggtgatttatatttgtgattttcgtattttgggaggttaaggtgggcggattttttgaggttaggaatttgatattagtttgtttaatatggcgaaatttcgtttttattaaaattataaaaattagtcgagtgtgatggcgtgcgtttgtaatattagttatttgtgaggttgaggtaggagaatcgtttgaattcgggaggtagaggttgtagtgagtcgagattatattatagtattttagtttgggtgatagagtaagattttgttttaaaaaaataagaaatagaaatatatatatgttgttataagaaatttattattttttagtaaaaaatatagatttttaattaaagaaaggggaaatttttttttaaataattttagaattcggggtagaaaacgttatatgtggaaattcgttttgaaaaatagtttcgtttgtgaataggaaatatttggattatattttttttatttttacgaaggatttaaatgtgtagtattgatgaagaggtagttagttttagtttttattatttttgtatattttatttgtttttttttatggtatagttttgggggtaggttataaattcgtaagatgttattagtattattggttaagatgtaggaatcgttaggagttttagaaataggggagagttagaaagttggttagatttatgttttttaagtgtagggttagggttgagtttgtttttggggtaggtaagtttttttgaatttttgagggaagtagaagatataaattgttagataaaatgtaagtttagtttaaaagggttacgtgtcgttttttttagttttggggtattttttttttagaaaattggattgttttatagtgaaaatttcgggggtggttagttttttgtttcgttgttatttttattatttatagttttttaagaagtttttaggttgggtgttgaattttgattaggaattattgagaaatcgaggtagttgggagaagttgtagttttaagcgttgaaaggaagatgggggataataaatttgggtcgttaagtaaagggggtagaggtttggagaagtgggttttaggattagaggatagatcgattttatattttatttttttagattttatattttattgttattattatttacgtgtttttttcgttttttgtagcgggttttttagaggtattttttatggtttttttagattttaattttggttcgttcgttttttttttagaaaggttttcgtttgttttttttgtaggaaggtttgtatttttagaaagtttttgtttttcgattcgaggatttaatttattaggggaattaaattttgtttttaggggagtggagagagaaattgggtttttttttcgtagtttttgggatatagttgagttagttataggatttggggataatcggggcggattttttttttcgggaggcggtggtattagtttagagttcgtatttttatttatcggggaagcgtggggagaaggatgggttggagttgggttttggtttgaaggatagtagttcggagttaacggttgagtttttaaagtttttatattgtagaggaagtatagcggagattagttttagttaggatggtttcgaagtttttagggattcgacgtagagttaaagaaatttatttgtgtttttttttttttttgggagtaggtagaagattttcgggaggagaggcgaatagcggacgttaatttttttgaaagtattgtgttttttagtatcgcgggtcgttacgggttttttgttgtcgcgggatttcggtttatttttcgattgggtcgtcgtatttcggattagatttcgcgggcgatttacggaattcgcggagtcgggacgtgaaaggttagaaggtttttcgtttttattaagttttagggtttttcgtggttgttgggagttgtagtttgaacgtttttattttggcgagaagcgtttacgttttttttatcgagtttcgcggtaatttttaaagtatttgtatcgttttttcgtcgtttgtagagggcgtagtaggttttgtattttttttgtattttattttttaggttttagatttgttttttttatttaaaaaatatttattatcgagtttttatttgttatttagtattgatataggtatttaggaatataataatgaataagatagtagaaaaattttatatttttataaggtttacgtttttatgtattgaaagtaatgaataaataaattttattagagtgataagggttgtgaaggagattaaataagatggtgtgatataaagtatttgggagaaaacgttagggtgtgatattacggaaagtttttttaaaaaatgatattttaattgatgagaagaaaggatttagttgagagtaaacgtaaaagtttttttttttttattttttatatttgatataatgtaggatttttttaaaatgatttttattaattttgtttttatagttttggtttgtagaattttttattttaaaatgttagtatttacggtattaggtcggcgagaattttgattttgtatttttttttttaattttattttttttgtttttttcggtaggcggattatttgtttttatttgttatggcgattgtttagttttgtgttaggagtttcgtaggggttgatgggattggggttttttttttttatgtgtttaagattggcgttaaaagttttgagttttttaaaagtttagagttatcgtttagggagtaggtagttgttgggtttcggggatattttgcgttcgggttgggagcgtgttttttacgacggtgatacgtttttttggattgggtaagtttttgattgaatttgatgagttttttttgagttacgggttttcggtttcgtgtatttttagttcgggaaaatcgttggggttgggggtggggtagtggggatttagcgagtttgggggtgagtgggatggaagtttggttagagggattattataggagttgtattgttgggagatttgggtgtagatgatggggatgttaggattattcgaatttaaagttgaacgtttaggtagaggagtggagttttggggaattttgagtcggtttaaagcgtatttttttgtatatttattcggtgttgggcgtagggaatttttgaaataaaagatgtataaagtattgaggtttgagatttttggatttcgaaatattgagaatttatagttgtatattttagagtttatggtattttagtgaaaattggggttttatttcgaaatgattatttgggggtgattcggggagtttaagttgttaaggttttataattttcggatttttgttttttttggagcgatttttttaggtagttttcggtttcgttagatggagaaaatttaattgaaggttgttagtcgtggaagtgagaagtgttaaattaggggtttgttcgttaggtcgaggaggatcgtcgtaatttgagaggttcggtagttttgttattgtttggttttatatttatatttttgttttttgtagtagtattttcggtttttttttgtcggagtagtttattatttattcgatgagaggggaggagagagagagaaaatgttttttaggtcggttttttttatttggtagagggaggttgttatttttcgtttgtatttttttttttggattatttagttatggtttttgtaaaggtaggggtatttgttttgatgtaaattttaatttttttttttttttgaatggtgtgttttatttcgcgggtcgtttgtaatttaggcggacgttattatggcgtgagatagggagggaaagaagtgtgtagaaggtaagttcggaggtatttttaagaatgagtatattttattttttcggaggaaaaaaaaaaagaatgggtacgtttgagaattaaattttgaaagagtgtaatgatgggtcgtttgataatttgtcggaaaaataatttatttgttatttagttttgggttaggttattttagttttagacgtaggttgaacgtcgtgaagcggaaggggcgggttcgtaggcgttcgtgtggtttttcgtgtagtttttcggttcgagtcggttttttttggtaggaggcggaattcgaatttatttttttcgttgttttattttttagttcgcggttgttttatttcgtagtttttttttatgtatttgtcgcgtatcggttattttgtgtcgtatttacgttattttttttttaaatcgaggtggtatttatatatagcgttagtgtatatagtaagtgtataggaagatgagttttggtttttaatcgtttcgtgatgtttattaagttatagattttttttatcgttttagaaacgttttattacgtttttttttagtcgattttcgattttatttttattttgatttttataattattttgtttgttggagaattttatatagaatggaattaggttgggcgttgtggtttacgtttgtattttgggaggtcgaggcgggcggattatttgaggataggagttttagattagcgtggttaacgtggtgaattttcgtttttattaaaaaatataaaaattagttgggcgtggtgggtgtttgtaattttagttattcgggagggtgaggtaggagaatcgtttgaattcgggaggtagaggttgtagtgagttaagatcgtgttattatattttagtttgggcgataagaacgaaatttcgttttaaaaaaaaggggggaattatatattatgtgtttatttttgtcgggtttttgttttttaatgtattgtttgatattcgtttatgttgtatatattagtattttgtttttttttatttagtatagtttatcgattgtatattcgtttttttgatggttttttgagttgttttttatttgcggttatgaaataaagttgttataaatatttttgtataattttttttgtgattatatgttttcgtgttttttggagaaatatttaggaggggaattgcgagtttggaagtaaaaagtagttgtattttgaatttttttagaagttttgagttttttagagcggttgtattattttatattttaattagtaaggtatgggagttattatggttgtgttatagtttttcggatattaggtattgttagtttttttaatgtggtatatttttgtggttgtaatttatagttttttattgattaaggatgtttagtatttttttatgtgtttattggttattcgtattttgtttgtaaagtagtttttcgagttttttatttgttattttggttttttgtttgtttttattgtttagttgtgggattgttttatatattttggatataagttttttattagatttatgtgtcgtgaatgtttttttttgatttgttgtttgtttatttgtttgttttatagagtttatagtattttaagaggagtggatttattttttttatgtttagtatttgttttgttttgtttaggatatttttttttttttttttaattttagggttatgaagatattattttatatttttttttaggatttttatggttgtaagttttatagtaaggtttttgagttattaattaatttttaaaattaattgtttatggtgtgaggtgtaggagttagtttttggtattttttttgtatggaaatttagttattttgtttttatttgttgaaataggttttttttttttattgaatgtttttaattttaattattttatagttggagtatagggttattattttagtgttattttttttttttttttgttaatttttgagatagggatttatattgttgtttaggttagagtataatggtataattaaggtttattgtagtttcgaatttttgggtttaagtagttttttagtagttttacgagtagttgggattattttattatatttagttaattattttatttttttgtattgataggattttattatgttgtttaggttggttttaaattgttggttttaagtttttattttatttcggttttttaaagtgttgggattataggtgtgagttattatgtttgattttttagtgttattttttatttattttttttgttttttgttttttttaaacgttggaggaagaaatagtatttattttatataaattttttagaaaatagaggaatagattgggcgcggtggtttatatttgtaattttagtattttggtacgttgaggtaggggattatttgaggtcgggagttcgagattagtttggttaatacggcgaaattttatttttattaaaaatataaaaagtagttaggcgtggtgatatatatttgtaatgttagttatttaggaggttgaggtataagaattttttgaatttgggaagcggaggttgtagtgagtcgagattgcgttattgtattttagtttgggtaatagagtgagattttgttttagaaaaaaaaagaaagaaagaaaaaatagaggaatattttttaatttgttttcgaagttagtataattttggtattaaaattaaataaggatattataagaaaagaaaatatagattaatatttttgttagtatagatatgtaatagttaattaattttagtaaattaaatttggtaatatagaaaaaaggataaataggttagtcgcggtggtttacgtttgtaattttagtattttgggaggttgaggtaggtagattatttgaggttaggagtttgagattagtttgattaatatggtgaaatttcgtttttaataaaaatataaaaattaggttgggtacggtggtttacgtttgtaattttagtattttgggaggtcgaggtgggtagattacgaggttaggagtttaagattagtttgattaatgtggtgaaacgttatttttattaaaaatataaaaattagtcggtgtggtggtatttgtttgtaattttagttatttaggaggttgaggtagaattgtttgaattcgggaggtagaggttgtagtgagttaagatcgtgttattgtattttagtttgggcgatagagtaagattttattttaaaaaaaaaaaaaaattagttgggtatggtggtgggtatttgaaattttagttattcgggagtttgaggtaggagaatcgtttgaatttaggaggtagaagttgtattgagttgggattatattattgtattttagtttgggtaatagagtgagattttattttaaaaaaagaaaaagaaaaaggataaatatattttaattaaataatgtttattttatgattgtagttgatttaatatttaaaaattggtttggtgtagtagtttaggtttgtaattttaatattttaggaggttgaggtaggaagattttttgagtttaggattttaagattagtttgggtaatatagttagattggtttttattggggggaaaaaaattagtttgtgtaatttattatattaataaagggaaatataaaaattttatgattattttaatagatgtagtaaaagtagttaatgatatttaatatatatgtatgattataaattaattaattttttagtaaattagggaaaggaaatttaatttagtttgataatagggcgtttatagtcggagttttattagtagtatatataatggtagaaaatttagtgttgtcgggcgcggtggtttacgtttgtaatgttagtattttgggaggtttaggcgggcggattacgaggttaggagatcgagattgttttgattagtatgttgaaatttcgtttttattaaaaatataaaaataaaaaattagtcgggtatggtggcgggcgtttatagttttagttattcgggaggttgaggcgagagaatggcgtgaattcgggaggcggagtttgtagagtttagatcgtgttattgtattttagtttgggtgatagagtgagatttcgttttaaaaaaaaaaaaaaaaaaaaaagaaaagaaaatttaacgtttttttttttaagattaggaattagaaaaggatttgatttttataacgttgatattatattggaggttttaattaggtaagaaaaagaaataatgagggtcgggtgcggtggtttaggtttgtaattttagtattttgggaagtcgagacgggtggattacgaggttaggagatcgagattattttggttaatacggtgaaattttgtttttattaaatatataaaaaattagtcgggcgtagtggcgggcgtttgtagttttagttattcgggaggttgaggtaggagaatggcgtgaatttagggggcggagtttgtagtgagttgagatcgagttattgtattttagtttgggcgatagagtaagattgtgttttaaaaaaaaaaaaagaaaaagaaataatgattagtggttcgatgttttacgtttataattttagtattttgggaggtcgaggtgggtagattatttgaggtttggagttggagattagtttgataaagatggtgaaatttcgtttttattaaaatattaaaaaaatagttaggcgttggtcgggtatagtggtttatgtttgtaattttagtattttgggaggtcgaggtgggtggattatttgaggttaggagtttaatattagtttggttaatatggtgaaattttatttttattaaaaatataaaaattagtcgggcgtagtggcgggcgtttgtaattttagttatttgggaggtttaggtaggagaatcgtttgaatttgggaggcggaggttgtagtgagtcgagattgtattattgtattttagtttgggtgataaaagtaaaaatttcgttttaaaaaaaaaagaattagttaggggtagtggtgaacgtttgtagttttagttatttaggaggtagaggtaggagaattatttgaatttaggaggtagaggttgtagtgagtcgagattgttttattgtattttagtttaggcgataagagtaaaattttatgttaaaaaaaaaaaaaaaaaaggaaagaaaaaaaataacgattagaaaggaagaaataaaatatatttatagttagtatgattttatatatatatgttttaatggggttaggcgtggtggtttatgtttgtaattttagtatttttaggaggttgaggtaggtggtttttttgggattagtttggttaatatggtgaaattttaattttaataaaaatataaaaaattagttaggcgtggtgacgggtatttttaattttagttatttaggaggttgaggtaggagaattgtttggatttgggaggtagaggttgtagtgagtcgagatcgcgttattgtattttagtttgggtaataagagtgaaatttcggtagggtgtggtggtttacgtttgtaattttagtatttcgggaggttgaggtaggtcgattatttgaggttaggagtttgagattaatttaatatggtgaaatttcgtttttattaaaaatataagaattagttgggtgtagtggtgggcgtttgtaattttagttatttgggaggttgagatagaagaattgtttgaatttaggaggtggaggttgtagtgagttgagattatgttattgtatattacgtcgggtaatagagcgagatttcgttttaaaaaaaaaaaaaaagagtgaaattttattttaaaaaaaaaaaaaagttttaatggaaaatttataaaaagttattaaaattaataaataaatatagtagggttgtaggttatagggtaatatagttatttttttatttgtaggggtttggttttgggattttttatatattaaatttatagatgtttaagttttatatataagacggtatagtatttggatttaatttatatatatttttttatatagtttaaattatttttagattatttatattatttttatataatgaaaatgttaatgtatatgtaagtatgtatgtaagtatttgtattatattgtttagggaattattggatatataggtttttaagattgatattagtagttattgttaagattttggttaggtttgtttttgtttggggttttagttgattttattgtttttttatttagttaagggtatttgtattttttttggttttttggttatttggaaggtttagtttagtttggtatatttgtattttggtttattgatgttggtatttttgggaaggttttgttttgaaaaatacggagattttagttgttattgaagatttgagagataaagatagggagatttgtttgtagatttgtgtttttttaagtgggattgagattttgggttttttattttaggatagtattttttggtttgttgattgaatagatttttgaaggaggtgtatttgtattaatggagtgggggtgggagtagtattatagattcgtattaataattatatagttttttttagaataataatatagaataagtgaaatagaataattgtagaaagagttaatttttgttgagtttttattgtgtgtttagtattttttttaattttatattttttataatatatagagtattaggtaggttaggtttggtggtttacgtttgtaattttagtattttaggaggttaaggggggtggattatttgaggtcgggagtttaagattagtttgattaatatggtgaaatttcgtttttattagaagtataaaattagttaggtgtggtggtatatgtttgtagttttagttatttagtaggttgaggtaggagaattatttgaattcgggaggaggttgtagtaagcggagatagtgttattgtattttagtttgggtaataagagttgagatttcgttttaaaataaaataaaataaaataaaataaaataaaataaaataaaaaaagaaaagagtttgttattaaaggagttgtttggtaggggatgttttgttagtgtaaataatagaaaagtgggttgggtatagtggtttatgtttgtaattttagtattttgggaggttaaggcgggcggattatttgaagttgggagtttaagattagtttgattaatatggagaaatttcgtttttattaaaaatataaaattagtcgggcgtagtggcgtatgtttgtaattttagttattcgggaggttgaggtaggagaatcgtttgaatttgggaggtagaggttgcggtgagtcgagatcgtattattgtattttagtttggacgagagtaaaattttgttttaaaaaaaaaaaaaaatagaaaagtgtaataaatatttatagtaggtatgttttttagtaaatttgatgataaatttggtataaagaaagagagtatttttgaaaaaaaaaaaaagaaaaagaaagagagtattttgtttgggtaatatagtgaaattttgtttttataaaaaaatttaaaaattggtcgggtgtagtggtttatatttgtaattttagtattttgggagtcggaggcgggaggattatttgaggttaggagttcgaaattagtttggttaatatggtaaaattttatttttattaaaaatataaaaaattaattaggcgtattggtgggcgtttgtaattttagttatttaggaagttgaggtaagaggatcgtttgaatttgggaggtggaggttatagtgagtcgagattatattattgtattttagtttgggtgatagggcgagatttcgtttttaaaaaaaaaaagaaaaagaaaaagattaaaaaattagttaggtaggtttttgtggttttagttatttgggaggttgaggtaggagaattattgagtttaggagttcgaggttgtagtgagttatgattgtattattgtattttagtttgggtaataaagtaagattttgttttaaaagaaaaaagaaagaaagaaagaatatggcgggttaggtatagtggtttatatttgtaattttagcgttttgagaggtcgaggtaggtggattataaggttaggagttttatattagtttggttaatatggtgaaattttgtttttattaaaaatataaaaaattagttaggtatggtggtaggggtttgtaattttagttattcgggaggttgaggtaggagaattgtttgaaattagaaggtagaggttgtagtgagtttagattgtattattgtattttagtttgggcgaaaagagttaaattttattttaaaaaataaataaaaaaataaaataaaagaaaatatggtaaagtttttgaaagtttgtttgggagaaggtgcgatgatagttgtataatttcgtgtaagatgttggtttatataggggttgttttttgttttttttcgtttttttaattttttatataataggtttgtgtgttatttatatttattgagtttaagtaggtgtaaggtattgtgatttaatattttggttagtaagataataagatagattattgttttgtttttaggaagtgtatatgttattagaggaaatagataaaataaataaggaaaagtattagataatgtaagtgttatgagaatgtaaatgaggtgatgtgaattaaaataggatgatttaaagtttgtacgggaaggagtttatttttatgtttttggttagttaaggaattattagttgattagtagagaagggtagttagtttagttagagtttttggggaagagggagtggttgttaagagatgagattaaagaagtcgagacgggttattcgtgaggggtttgtaatgtagggttgaggagtgttcgaagagaatgggtaggtgagcggtgagatagttgtttttttagaagttttgtagtgaaaggaattaaagaaatggagtcgtgtattaggtggggaagggtgggggttaagggggtgtttttttttatatagagattgtaggttgagaatgattatatttttgttaataggaggtgggagtagggtacggtagtttatatttgtaattttggtattttaggaggttgaggcgggtcgattatttgaagtaaggagttcgagattagtttggttaatatgtaaagttttgtttttattaaaaatataaaaattagttgggtgtggtggtattcgtttgtaattttagttattcgggagattgaggtaggagaatggtttgaattcggaaggtagaggttgtagtgagttgagattatgttattgtgttttagtttaggtgatagagagagattttattttaaaaaaaaaaaaaaaatataggaagggagttgggaatagggtgtatatttaggaagttttggggatttagtggtgggaaggttggaagtttttttttgattgttttttttttaaagaagtgtatggttggtgaggggtggggtaggagtgtttgggttgtggtgaaatattggaagagagaatgtgaagtagttattttttttttgttttataggaagtcgagttgttttagatattggtatggtgttgggggagggggttttttttttgtaggtttaggtgatttagggttggaagtgttttatgttggatttttatttttttttttgtagt

SEQ ID NO: 324 - DNA, 14708 bp, Artificial Sequence
  chemically treated genomic DNA (Homo sapiens)
gttgtaagaggaaaagtggggatttagtatgagatatttttaattttgggttatttgggtttgtagagaaggaatttttttttttaatattatgttagtgtttgagatagttcggttttttgtggagtaggaaaagaatggttgttttatatttttttttttaatgttttattataatttaagtatttttgttttattttttattagttatgtatttttttgaggaaaagataattagagagggatttttaatttttttattattaaatttttaagattttttaaatgtgtattttatttttaattttttttttgtattttttttttttttttgagatggagtttttttttgttatttaggttggagtatagtggtatgattttagtttattgtaatttttatttttcgggtttaagttatttttttgttttagtttttcgagtagttgggattataggcgagtattattatatttagttaatttttgtatttttagtagagatagggttttgtatgttggttaggttggtttcgaattttttattttaggtgatcggttcgttttagttttttaaagtgttaagattataggtgtgagttatcgtgttttgtttttattttttgttaataaggatatagttatttttagtttgtaatttttgtatggggaaggatatttttttggtttttatttttttttatttgatatacggttttatttttttgattttttttattgtaaagtttttggaagaataattgttttatcgtttatttgtttatttttttcggatattttttagttttgtattataaattttttacgaatggttcgtttcggtttttttaattttattttttaataattatttttttttttttaaaagttttagttagattggttgtttttttttgttaattaattggtggttttttggttagttaggaatatgggggtaggttttttttcgtgtagattttaagttattttattttaatttatattattttatttgtatttttatagtatttatattgtttgatatttttttttgtttattttatttgttttttttaatagtatatatattttttaagggtagggtagtgatttattttgttgttttgttgattaaagtattagattataatgttttgtatttgtttgggtttaataaatgtgaataatatataagtttgttatatgagaggttaagagagcgagaaagagtaaggggtagtttttgtgtggattagtattttgtacgaagttatgtaattattatcgtatttttttttagataagtttttaaaggttttgttatgtttttttttgttttgtttttttgtttgttttttgagatggagtttggtttttttcgtttaggttggagtgtagtggtgtagtttaggtttattgtaatttttgttttttggttttaagtaatttttttgttttagtttttcgagtagttgggattataggtttttgttattatgtttggttgattttttgtatttttagtagagatagggttttattatgttggttaggttggtgtggaatttttgattttgtgatttatttgtttcggttttttaaagcgttgggattataggtgtgagttattgtgtttggttcgttatgttttttttttttttttttttttttttgaggtagggttttgttttgttgtttaagttagggtatagtggtgtaattatggtttattatagtttcggatttttgggtttagtgatttttttgttttagttttttaagtagttgggattatagaggtttgtttggttaattttttagtttttttttttttttttttttttttggagacggagtttcgttttgttatttaggttagagtgtagtggtgtgatttcgatttattgtaatttttattttttagatttaagcgatttttttgttttaattttttgagtagttgggattataggcgtttattaatgcgtttgattaattttttgtatttttagtagagatggggttttgttatgttggttaggttggtttcgaatttttgattttaggtgattttttcgttttcgatttttaaagtgttgggattataggtgtgagttattgtattcggttaatttttgagtttttttgtagaggtagggttttattatgttgtttaggtaggatgtttttttttttttttttttttttttttttagggatgttttttttttttatgttaaatttgttattagatttgttaagaaatatgtttattgtaagtgtttgttatatttttttgtttttttttttttttgagatagagttttgttttcgtttaggttggagtgtaatggtgcgatttcggtttatcgtaatttttgttttttaggtttaagcgatttttttgttttagtttttcgagtagttgggattataggtatgcgttattgcgttcggttaattttgtatttttagtagagacggggtttttttatattggttaggttggttttgaatttttaattttaggtgattcgttcgttttggttttttaaagtgttgggattataggtatgaattattgtgtttagtttatttttttgttgtttgtattgataaaatattttttattaaatagtttttttaatggtaggtttttttttttttttattttattttattttattttattttattttattttattttgagacggagttttagtttttattgtttaggttggagtatagtggtattattttcgtttattgtaattttttttcggatttaaatgatttttttgttttagtttgttgagtagttaggattataagtatgtgttattatatttggttaattttgtatttttagtagagacggggttttattatgttggttaggttggttttgaattttcgattttaggtgatttattttttttggttttttaaagtgttgggattataggcgtgagttattaagtttggtttatttagtattttgtgtattatgggaaatgtagagttgaggaaagtgttgggtatatagtaagagtttaataaaggttagttttttttgtaattgttttattttatttgttttatattattattttagagagaattgtgtgattgttagtgcggatttgtggtattgtttttatttttattttattaatgtaagtatattttttttagggatttatttagttaataggttaggaggtgttgttttgaaatggggggtttaaagttttaattttatttggagggatataggtttatagataggtttttttgtttttattttttaaatttttagtagtaattaaaattttcgtgttttttagagtaggatttttttaggggtattagtattagtgggttaggatataaatgtgttaggttgaattaggttttttaaatggttagggagttaagagaaatgtaggtgtttttggttgggtgggaaggtaatgagattaattgagattttaaataggggtaggtttgattagaattttaatagtggttgttggtattagttttgaaggtttatatgtttagtgattttttaaataatatagtataagtatttatatatatatttgtatgtatattagtatttttattgtatgggggtaatgtaagtaatttagagataatttaaattatatgggaggatatgtgtaggttaaatttaaatattatatcgttttatatatgggatttagatatttgtgggtttggtgtgtgaggagttttagaattaagtttttatagatagagggataattatattgttttgtaatttgtaattttgttatatttatttattagttttggtagttttttatggattttttattaggatttttttttttttttgagatagagttttattttttttttttttttttgagacggaatttcgttttgttgttcggcgtggtgtgtaatggtatgattttagtttattgtaatttttattttttgggtttaagtaatttttttgttttagttttttaagtagttgggattataggcgtttattattatatttagttaatttttgtatttttagtagagacggggttttattatgttaggttggttttaaatttttgattttaggtgatcggtttgttttagtttttcgaagtgttgggattataggcgtaagttattatattttgtcggagttttatttttgttgtttaggttggagtgtaatagcgcgatttcggtttattgtaatttttgttttttaggtttaagtaatttttttgttttagttttttgagtagttgggattagaggtgttcgttattacgtttggttgattttttgtatttttattagagttggggttttattatgttggttaggttggttttagggaagttatttgttttagttttttaaaagtgttaggattataggtatgagttattacgtttggttttattaggatatgtatgtatagaattatattggttgtgaatgtgttttatttttttttttttaatcgttattttttttttttttttttttttttttttttttgatatggaattttgtttttgtcgtttaggttggagtgtaatgggataatttcggtttattgtaatttttgttttttgggtttaagtgatttttttgtttttgttttttgagtagttgggattataggcgtttattattatttttggttaatttttttttttttgagacggagtttttgtttttgttatttaggttggagtgtaatggtgtaatttcggtttattataattttcgttttttaggtttaagcgatttttttgtttaagttttttaagtagttgggattataggcgttcgttattacgttcggttaatttttgtatttttagtagagatggggttttattatgttggttaggttggtgttgaatttttgattttaggtgatttatttatttcggttttttaaagtgttgggattataggtatgagttattgtattcggttaacgtttggttatttttttaatattttaatagagacgaggttttattatttttgttaggttggtttttaattttagattttaggtgatttgtttatttcggttttttaaagtgttgggattataggcgtgagatatcgggttattaattattatttttttttttttttttttttttgagatatagttttgttttgtcgtttaggttggagtgtagtggttcgattttagtttattgtaagtttcgttttttgagtttacgttatttttttgttttagtttttcgagtagttgggattataggcgttcgttattacgttcggttaattttttgtatatttagtagagatagggttttatcgtgttagttaggatggtttcgattttttgatttcgtgatttattcgtttcggttttttaaagtgttgggattataggtttgagttatcgtattcggtttttattattttttttttttgtttggttaaaatttttagtatggtattaacgttgtgagagttaaatttttttttagtttttgattttagaggaaaaagcgttgagttttttttttttttttttttttttttttttttgagacgaagttttattttgttatttaggttggagtgtagtggtacgatttaggttttgtaagtttcgtttttcgggtttacgttattttttcgttttagtttttcgagtagttgggattataggcgttcgttattatgttcggttaattttttgtttttgtatttttagtagagacggggttttagtatgttagttaggatagtttcgattttttgatttcgtgattcgttcgtttaggttttttaaagtgttggtattataggcgtgagttatcgcgttcggtagtattgagttttttattattatgtatgttgttagtggaatttcgattgtggacgttttgttattaaattaggttaagttttttttttttagtttgttaggaggttggttggtttgtaattatgtatatgtgttgaatattattaattgtttttgttatatttgttgaaatgattatagggtttttatgtttttttttgttaatgtggtgaattatatagattgatttttttttttttagtaaagattagtttgattatgttgtttaggttggttttgaaattttgggtttaagagatttttttgttttagttttttaaaatgttgggattataggtttgagttattgtattaggttaatttttgaatgttgaattagttataattatgagataaatattatttggttagaatgtatttattttttttttttttttttttttgagatggagttttattttgttgtttaggttggagtgtaatggtgtgattttagtttagtgtaatttttgttttttgggtttaagcgatttttttgttttagattttcgagtagttgggattttaggtgtttattattatgtttagttaatttttttttttttttgagatgaagttttgttttgtcgtttaggttggagtgtagtggtacgattttggtttattgtaatttttgtttttcgggtttaagtaattttgttttagttttttgagtagttgggattataggtaggtgttattatatcggttgatttttgtatttttagtagagatggcgttttattatattggttaggttggttttgaatttttgatttcgtgatttgtttatttcggttttttaaagtgttgggattataggcgtgagttatcgtgtttagtttgatttttgtatttttattagaaacggggttttattatgttggttaggttggttttaaatttttgattttaagtgatttgtttgttttagttttttaaagtgttgggattataggcgtgagttatcgcgattggtttatttatttttttttttatattattaggtttggtttgttaaaattggttagttgttgtatgtttatgttaataggaatattggtttatattttttttttttataatgtttttgtttggttttggtattaggattatgttggtttcgaaaataagttgggaaatatttttttattttttttttttttttttttttttttgagatagggttttattttgttgtttaggttggagtgtagtggcgtaatttcggtttattgtaattttcgttttttaggtttaagggatttttgtgttttagttttttgagtaattggtattataggtatgtgttattacgtttagttattttttgtatttttagtagagatggggtttcgtcgtgttggttaggttggtttcgaattttcgattttaaatgattttttgttttagcgtattaaagtgttgagattataggtatgagttatcgcgtttagtttgtttttttgttttttgaagagtttgtgtaagatgggtattgtttttttttttaacgtttaaagagagtagagaatagaggagataaatagaaaatagtattaagaggttaggtatggtggtttatatttgtaattttagtattttgggaggtcgagatgggatgaaagtttgaggttagtagtttgagattagtttgggtaatatagtgagattttgttaatataaaaaaataaaatagttagttgggtgtggtggagtaattttagttattcgtgaggttgttagaggattgtttgagtttaggggttcgaggttgtagtaagttttgattgtgttattgtattttagtttgggtaatagtgtgagtttttgttttaaaaattaataaagaaaaaaagaaaatagtattaaaatggtagttttatattttaattgtaaaataattaaaattaaaagtatttagtagagaaaggaagtttattttaataagtggagatagaataattggatttttatataggaaagatattagagattgatttttatattttatattataaataattaattttaagaattaattaatggtttaaggattttattgtaaaatttataattataaaggttttaaaagaaaatgtaagataatatttttatgattttggggttaaaaaaaaaaaaaaagatgttttaaataggataaggtaaatattgaatataaaaaagataaatttattttttttaagatattgtaaattttgtaaagtaaataaataggtaagtaatagattagaagaaaatatttacgatatatggatttgataaaggatttgtatttagaatgtataaagtagttttataattgaataataaaaataaataaaaaattaaaataataggtaaaagattcgaagagttattttataaataaaatacgaatggttaataggtatatgaaaaaatgttgaatatttttagttaatagagaattgtaaattataattataaggatatattatattagaaagattgataatatttaatgttcggaaggttgtggtataattataataatttttatattttgttagttggagtgtaaaatggtataatcgttttggaaaatttagagtttttgaaaaagtttaaaatatagttattttttatttttaaattcgtaattttttttttaagtatttttttaagaaatacgaaaatatatgattataaaaagaattgtataagaatgtttatagtagttttattttataatcgtaaatgggaaataatttaaaaggttattaaaaggacggatatataatcgatggattatattaaatgaaaaggagtaaaatattgatatatataatatgaacgaatgttagatagtatattgaaggatagaagttcgataaaaatgagtatataatgtatgattttttttttttttttgagacggagtttcgtttttgtcgtttaggttggagtgtagtggtacgattttggtttattgtaatttttgtttttcgggtttaagcgatttttttgttttattttttcgaatagttgggattataggtatttattacgtttagttaatttttgtattttttagtagagacggggatttattacgttggttacgttggtttggaatttttatttttaagtaattcgttcgtttcggttttttaaagtgtaggcgtgagttatagcgtttagtttgattttattttatatgaagttttttaataggtaaaatggttatggagattaaaataaaggtggggtcgggaatcgattgggaagagacgtgatgaaacgtttttgggacgatgaaaagggtttgtgatttggtaggtattacggagcggttaggggttaaaatttatttttttgtgtatttgttgtgtgtattggcgttgtgtgtaaatgttatttcgatttaggaaaaagatgacgtaagtacggtataaagtggtcggtacgcggtaggtgtatgggaagaaattgcggaatgaaataatcgcgagttaagagatggggtagcgggagaaatgaattcgagtttcgttttttattaggaagaatcggttcgggtcggagggttgtacggaggattatacggacgtttgcgggttcgtttttttcgttttacgacgtttagtttgcgtttggaattggaatggtttagtttaaagttagataataggtagattgttttttcgataaattattaaacgatttattattgtatttttttaaaatttgatttttagacgtatttattttttttttttttttttcgggaagatgagatatatttatttttgaaaatattttcgggtttgttttttgtatatttttttttttttttgttttacgttatggtagcgttcgtttaggttgtaggcgattcgcggggtggggtatattatttaaagaaggggagggattgaggtttgtattaaaataaatatttttgtttttgtaaaggttataattaagtaatttagaaaaagaaatgtaggcggagaatagtagtttttttttgttaagtaagaggaatcggtttaaaggatatttttttttttttttttttttttttatcgggtgaatagtgagttgtttcggtaaaaagaaatcggaaatgttgttgtaagaggtagaaatgtaaatgtggagttaaataataatagggttgtcgggttttttagattgcgacggtttttttcggtttggcgggtaaatttttggtttagtattttttatttttacgattgatagtttttaattggattttttttatttagcggagtcgggggttgtttggaaagatcgttttaggaaggataaaggttcggaagttgtgggattttagtagtttgggtttttcggattatttttaaatgattatttcggaatggagttttagtttttattaggatgttatgggttttaaaatatatagttatgagtttttaatgtttcgagatttaaaagttttagattttaatgttttgtgtattttttattttagggattttttacgtttagtatcgggtggatgtgtaaagaagtacgttttaggtcggtttaaggttttttaaagttttatttttttgtttaggcgtttaattttgagttcggatggttttaatatttttattatttatatttaggttttttaataatgtaatttttatgatgatttttttagttaagtttttattttatttatttttaaattcgttaagtttttattgttttatttttagttttagcgattttttcgagttgaaaatatacggagtcgagagttcgtgatttagagaggatttattaagtttagttaggagtttatttaatttagggaagcgtgttatcgtcgtggaaagtacgtttttagttcgaacgtaaagtgttttcggagtttagtagttatttgttttttggacggtggttttagatttttgagaagtttaaaatttttagcgttagttttgagtatatgggaggggaaaattttaattttattaatttttgcgaggtttttggtataaagttggatagtcgttatgataagtaagggtaagtaattcgtttgtcggaggaagtaaaggaaatggagttggggaggagggtgtagagttaggattttcgtcgatttggtgtcgtagatattaatattttggggtggaaaattttgtaagttagagttgtgagggtagaattggtggaaattattttggaggaattttgtattgtgttaaatatgaagggtggaaggaagaaagtttttgcgtttgtttttagttggattttttttttttattagttaaaatgttattttttaggaaggtttttcgtaatattatattttaacgtttttttttagatattttatattatattattttatttaattttttttataatttttattattttgataagatttatttgtttattgtttttagtatatggaaacgtaagttttatgaggatatagaatttttttattattttatttattgttgtatttttgagtgtttatattagtgttgggtagtaagtaagagttcgataataaatattttttgaatgagggagataggtttgaagtttggagaatgagatgtagaagaggtgtaagatttgttgcgttttttgtaggcggcgggggggcggtgtaggtgttttaagaattatcgcgggattcggtagggggagcgtaggcgtttttcgttaagatagaagcgtttagattataatttttagtagttacgaggagttttagggtttgatgggaacgggaaattttttaattttttacgtttcggtttcgcgggtttcgtgggtcgttcgcgaaatttgattcgggatgcggcggtttaatcggaaggtggatcgaaatttcgcgatagtaagaggttcgtagcgattcgcggtgttaaggaatatagtgtttttaaaagaattggcgttcgttgttcgttttttttttcgggagttttttgtttatttttagaagaggagggaagtataggtgggtttttttagttttgcgtcggatttttgagaatttcgaagttattttggttgaggttaattttcgttgtgttttttttgtagtatgaagattttggagatttaatcgttagtttcggattgttgttttttagattaggatttagttttagtttatttttttttttacgttttttcgatgaataaaaatgcggattttgaattgatgttatcgtttttcgaaaggggggattcgtttcggttgtttttagattttgtggttggtttagttgtgttttaggagttacgggagggggatttagtttttttttttatttttttggaaatagagtttggtttttttagtgagttgagttttcgaatcgaggagtaagaattttttgaaaatataagtttttttgtagaagaagtaaacgggagtttttttgaagaagaagcgaacgggttagagttggggtttggaaaagttatggaagatatttttggggaattcgttgtagaggacgagggagatacgtaagtggtgatggtagtggagtgtggagtttggggagatgaagtgtgaggtcgatttgttttttggttttgagatttatttttttaggtttttgttttttttgtttggcgatttaggtttattgttttttattttttttttagcgtttggaattatagttttttttagttgtttcgattttttagtggtttttggttagagtttagtatttaatttgagaattttttgaaaggttgtaagtggtaaggataataacggggtagggagttgattattttcgagatttttattgtaaaatagtttagttttttaggagagggatgttttagagttgggagaagcggtacgtagtttttttagattgagtttatattttatttagtagtttgtgttttttattttttttaaggatttaggggggtttatttattttagaggtaggtttagttttagttttatatttgaaaagtataggtttggttagttttttaatttttttttgtttttagggtttttgacggtttttgtattttgattaatagtgttgataatattttgcgaatttataatttgtttttagagttgtattatgagggggagtaggtggaatatgtagaaatggtaaggattggggttaattgtttttttattaatgttgtatatttaagtttttcgtggagatggaaaaagtgtagtttaagtgttttttgtttataaacgggattgttttttaagacgagtttttatatgtagcgttttttgtttcgaattttgaagttatttagagagaggttttttttttttttaattaggaatttgtgttttttgttaaaaagtagtgaattttttgtggtagtatatatatatttttattttttatttttttgagataaggttttgttttgttatttaggttggagtgttgtggtgtgatttcggtttattgtaatttttgtttttcgggtttaagcgatttttttgttttagttttataagtagttggtattataggcgtacgttattatattcgattaatttttatagttttagtagagacggggtttcgttatgttgggtaggttgatattaaatttttgattttagaggattcgtttattttggttttttaaagtgcggggattataggtgtgagttatcgtgtttggtttatagttatttattgattgattattgatatatgttagttattgtgttgggataaagtggtggataagatagatgaagggttggtttgttttttgtgtgggagatagataataaatatgtaaattagtaagtattaggattaagatgatgataaatgttttgaaggaaatatatagaatgaagagagattaattagaggaaagtatattgtataaaatggttaggaaggagttttttgaaaaggaggtatttgagttaagatttgaaggaggataagggattagttatgtgaaggtttttggaaagagttttttaggaattggtaatgatattataaatatttagaattgggaaatagttttgtgcgttaaaagattagaaaggttttgtatggtggtttacgtttgtaattttagttatttaggaggtcgaggtgtgtagattatttgaggttaggagttcgagattagtttggttaatatggtaaaattttatcgttattaaaaatattaaaattagacgtatgtggtggtacgcgtttgtaattttagttatttgtgtggttgaggtaggagaattttttaaatttaggaggtggaggttgtagttagataaaattgtattattgtattttagtttgggcgatagagtgagattttattttaaaaaataataaaatagattgggtttagtggtttatatttgtaattttagtattttgggaggttgaggtgggtagattatttgaggttaagagtttgagattagtttggttaatatggtaaaattttatttttataaaaatataaaaattagttgggtgtgatggtgggtgtttgtaattttagttatttgagaggttgaagtagaagaattatttgaatttaggagatggaggttgtagtgagttaagattatgttattgtattttagtttgggtgatagagtgagattttattttaaaataaataaataaataaataaataaataaataaatataaaataaaaaatttagaatgttggtatagttagattgaggtaagtgagggggatagaggggtgaggatagagaagtgtagtt

SEQ ID NO: 325 - DNA, 11187 bp, Artificial Sequence
  chemically treated genomic DNA (Homo sapiens)
ttgttgtttagttaataatgggataatttttttagtatttttttttatatttttttaattcgtttttaagttagatcgtaggaaatttaaagatataggtttttgttttattgtgtatgtaatacgttttaggatgtatttttttataggattaagaatgaatttatagtggaggttcgatagttttttattgtttgttttaatcgatattatagtttttaaatattatatttggaagggaagagaatgagagagatatagagagagaaataagtatgaagagaaataaaggtgagaaagggagaatattgttgtgatatagggaaagaagggacgtgatagaattaggtagggtgggtaggggaagattttaagataatggagagtgggaaaatagacgtatttaatattagaagtattagaaaaaaaggaaaataatatattttttttttttagaattatatagggaggtgggggaggaagatggggaaatagaaggagaaattgattaaggattttgtttgggggagataaaaggtataaaggatatagaggtaaagacgtttcggaaagttttagaggagtcgtttttttttgtttcgttattatttttaaagggatttgattttcgtaatagtttttggtatatgttggaggtaattgtttagatttttcgcgtttttgttttttgcgagtttttggtttgtgatagttattgtgatttttttgatgtatttgttagttagaggatcgcgtgagatgtaaatataaaattaaggggcgtttaatgtttgacgaggcgtatttttgggcgtagtgggagtttcgatttttgtggaggagaatgtgtaaagtatttttgagtagtttttatagatatttggtttttgtagattcggtttaaaggaggttttttttggaagtttattttagtatttatttatttttagcgggagtttatattagaagcgatgggcgttaaagggataggttgtgtgttttttagggtttgtatttatcggtttgtgagcgttttgcgtaaaagttaggtttttgtgttttgagtttttagtttttagcgtagtatttgatattggtatatgataggtgttttttatgtcggttagtagtagaataaaagattaggaaattttttcgatgtgggaagagttgggttagaaggtttttttgagaaattagaaaggttaggaatgtggagattagttatttaggacgtaaaagatgaaaatggagttttagtgggtaatagggttttagtatatttttttttagcggtttttttttgtttggcgtttaataatcgaagaataagtggatggatttcggtggtttttcgggtagttttttaggatttatgggtcgtagaggaacgttaattttttttttattggttgataatgtttcgaggggtagttttttaggtgtttatgtggttggtgggtgggatttagattttcgtagagtttttgttataggttttttttgttcggggttttgtagttagagaggggcggttgattgggagtttttttcgcgtttttttttttgtagagcgagtggatgcgcgtttttttcggtagagtgtaggatgtcggcgatatatttgtttgggaatagtgggagggttttttttttttcggggtcggtgaattattcgttttttcgtttgtaggtttcggagtaggtgatcggatttttttttggtttttttttcgtcggttttcggattattttttttggaaggaagttttttcgtttttttttttttttttcgttttcgtttcgttggtgtggttgtaggttcgagttggggttattcggcggttagtgtgcgtaggttttttggtcgtcggttagagggcgaaagtatttattcgaggtttttagtttcgcggttgttttggttgcgagtaacgagggaagaggaggtaggcgttttaaaattgggcgaagatttttattttaatttttaattcgagttttttatcgttagtgcgtttaatggcgttgttggtcggatggataatcgagttttttggagggatagacgcggtcgttatttttaataaatcgtgaataacgaatgagggaatcgattatttttatgaggtttacgggcgtttagtaacgtagtatcgattcgttttttcggcgtcggttttatcgttattttcggcgtttttaagttttttttttcgtttttttttttttgtcggagttattgcggatcggagttttagcgttaggtggagtcggggcgttagtgggagtcgggtttagtcgttttggcgttcgttcgattttttcgttcgcgcgtttagggaggcgtataggtagcgcgtagcgtagggcgcgagcgaaaaatgcgggaattagcgttaggtaggagaaaaggcgcgggtttattttatagttcggcgtttcgttttttagtttagtgtggtcgttcgttttcggtcggattattgtgttttagattcggagtttgagtttttatttttagcgggttttcgtttttttttgttcgagtacgtcgggggcgtagttttcgttagagttattcgattttttcgcggcgaggttttttattcggttttatttcgtatttttatttttttttcgcgattgttttttgttaggcgtttaggttggattttggtgcgtcgtttttcggggttagcgtttttgtcgtcgagggggtaaggggagtggggaggatacgttcgtttttttagatgtagttattaattttaagggagtgttatttggagtgaatgaaaatcgttcggacgtttggttgaaggcgtcgcgtttttcgtcggagtttcgcgttttttggtttaggtcggggcgtggaggattacgagttattttttagtttagtttttattttattattttttaggcgttttagttagggatgggtattatagtgttagtggggggaatttatattttgaagggaggggggttaattgcggaaggtaatataagagaatttatttttcggggtcggggcggtcgtatgggaagggaggggtttcgttttggttagggattcggtagtcggtggcggggagcggtcgcgttagtttttttttttttttttcgtttttgttagtattttgaaggaatgaggttacgtgggtgagtggtgggcgggatttatttttgtttggaggaaaaaagttattttgttttttttttatatttcggtttttttttttttttttcggtttttttttttttttttttttttttattttaagtcgtttttataaattttttttttatcgtaggttttttttttttcgtcgttcgggcgagcgatacggttgcggttttttttttttttttttttttttttttttttattttttttttttcgagatttatcggatttcgaatttaggtaagcggagcggattttttttgttttttttttttttggtttgtaattttttggggattgggatgggggtcggtcgtttttcgtaagtttcgatgggagggggaggttttgagtcgattttgttttcgtatttttcgcgtttcgttagtttttagtttagtttgtttcgttcgttttttttttttttttttttttgtttttttttttttttttttttttttaagatggtcgaaacgggtttttcgttttaacgatttggcgtttttttcgattattatttttttgtgtagtagttttcgggtagattttgtttcgaggtagcgagggggaaggttcggggtagtcgggagggtttgcgggatgcgcgttgggttgggtcgtcgttttttacgagttaaagtcgtttttcgttttgttcggtttatttttttttttatttgggcgggggtcgttttttcgtgggtataggggcgtcgtggacgcgcggggatttggggtcggtagaaggggatgtgttttggggcggtcgcgaggtcgggggagggcgttttttttcgtcggggttcgggttttttcgggtattttttttcgtcggttttcgtttttcgtttcggcgtcggcgtttcgtttttttttcgaattattttagtagagttttttttcggaatatttttttcggggtttcgtagaaagtttggttttagggaaggtgggagcggttattcggtaattggggtttttgatttttggatatgggtttttggggaagttcgggcgttgggggtagaatggggatggagggaaatttatcgtaatattttttatcgttagcggaagtagggggatttgttaaattggtttttttttttttgggacgtttagttattttattttgcgtacgtttttttattgttagttttgagggcgtgggattttcgggtaagtagatattttttgtttgtttttacggtgggttcgggttgtttttcgtttttttttattgtttttgtttgtttataatcgtttcggttggtttgaggtgggaggaggcggtatggaggcgggtggatttgttagtgaatattgtggaagtgttatttagcgtttttcgagatttttgttttttagtgttttttatgttgttttagtttttttagaggtttgtttcgaggggagggttgttttttggttgtttttttttcgttttgttttgatgtttttttttttgggatttttggtagtttttgtttttgaaattttttaatttttttttttttttttttttttattttggtttaaggtgttattattgggagtataaagttagttttgttgtagttttttggtgggaaggtttttttacgggtttttttggttgggggttgggggattgaggttttagaattgattttggaatgaagtaggaaattaattttaggatttagattatgtgtagttaggtagggtttaagttgaagttttgggggttgggtaggaagggggattttgttgtttttggttttgtttgagagattttggttgatggagttgttgttatgggaatggagagagttcgaataggaagagggtatagttttgtgtaggttatatgtttattgtagttttttagtttttggtttttagagcggattttggaagttgaattgtttttgttgttggaagatttatgttataatttattttgggtggattagggtcgtataaaaggttagtgtgtgtttgtagggtttgtttttaggtagggatgttaggttgtgtgtttttaggtggggggtggatgtggatggtttttgtatgtagcgagggtgggtttggttttggtttggttgtgattgtgtgtgtgtgtggcgtagggtgggggagggttgtggcgtgtttatttggttttgtgtgtagtgagtgtgagaggtggaggggggtgtgttttgttgtatgtgtgtgtatttggtaatgtgtatattttggggttttgtttttgtttgattttagggagttgagaggtgggagagggaggaagggagggttgagtaagtttagttttaggaggttttttttaatgtatggtggggataggggagtagatttttgtgttattgttaaggattggggaaagttgggaggtttatagtgtttttaggtagatttttacggttttaaatataaatataaggggtttgcgtagttggatttacgaagttgggagaggaatagagttataaaatttttggtttgagttttgatgttgtattttggttggttgtgtttttttgtagtttttgtttttttatgtgtaggaagtggggtaaggtaattaatatgtgttttttttttttgttttaaggtaggagtttatgttgatggttatgtttgggttagattgatttttttttagacggcggtttattgagtggttttttcgttattttagggagttgtttttttttttttttatttgttgggatgaagtcgggtattattgttttagatgagtgaggagtttggttaggtgttaggatgttaaaagtattggggtgggagttaggtatttttttgttataggattgttattgttttgttttgtgattttagataagttatatttgagtgtgtttatttgtaaaatgaaaggattgaataggtgtttttttttttttttttttttttttgagatggagttttttttattttgtggtttagtttggagtgtagtggtacgatttttatttattgtaatttttgttttttaggtttaagtaattttttggtttagttttttgagtagttgggattataggcgtttgttattatgtttcgttaatttttgtatttttgtttgtttgtttgagatagagtttcgttttgttgtttaggttggagtgtagtggcgtaatttcggtttattgtaatttttgttttttggatttaagcgatttttttgttttagtttttcgagtagttgggattagaggcgcgtgttattatatttaattaatgttttgtatttttagtagagacggggttttattatgttagttaggatggtttcgattttttgattttatgattcgttcgttttggtttttcgaagtgttgggattacggacgtgagttattatgtatttttagtagagatggggttttattatttttgttagtttggttttgaatttttgattttatgatttattcgttttggttttttaaagtgttgggattataggtgtgagttattacgtttagttgaataaggtgttttttaaaagtttttttatttttgtagttttagatatttggatgtgattttgagtgattttttttaagatttggagatattttagtgagggagtggggttgattttatttggaggtagggagagtagagagagttatggtattagagaagtataggggttttggggttgggagatttattgtttttataggggattatgaagaagtgagagaggtttaaattgtagggtggtttttagaaagatattggttaaaatggagagatgggtttgggtgtggtggtttatgtttgtaattttagtagtttgggaggtcgaggcgggtagattatttgaggttaggagttggaaattagtttggttaatatggtgaaattttgtttttattaaaaatataaaaattagttaggtgtggtggtatacgtttgtatttttagttatttgggaggttgaggtaggagaatcgttttaatttaggaggcggaggttgtagtgagtcgatattttgttattgtattttagtttaggagatagagtgagatttcgttttaaaaagaaaaaaaaaagagagagagagaaagagatggtggtgtttttttagtaggggtttttaaggattgggaaagataagtgttaggtttgaatggtaaagaggggtcggggttggatgttgggtgttgagtaagttttttttttgttatattagtaatagttagatttagggttttagggtttagaatgtgggttgtttaagggttatatatatttttgtaaagataatggtagaagatattgaagggtttggtttttgtttggggaaaagtggtgttagaggtggaggtagtgtttaagtttagggaggggtggatatatagttgggattgatttgttaaagtatttgagttttgtagaggttatttttaatggtgtttggttttttttttttgttttttgggatttgtgttttttattttttttttttcgagttttttttattttttagttttttttttaaagtaatgatagttggatttttagttatttattattttttttttttttatttttttatagtatattagttagtgtagcgggggaggaattgggtattaggaattcgcggtttggggttttttggggtggggagatggggagagggtgttttagggagttagagtttttgtttatattgtttttggtatttgttggtagggttttgtaggtaattatggtaattaggtgaggagttaattagtgtttttttttatttttagttttagaggtaatagttagaatttgtggggatggaatgaggggagtagggagtgtggtaaggggtttatttttttaaattggagaaggagtagcgttttatttagttagtattattttgggtttcgtgtttagaaagggtttagaggaataggttggggttgaatttttagaaatgttcggggaagtgattgggtgaggggtatagttattcgtagtgtggggttttcggttgtggggttttttttaaaagtaagtgttagtcgggtgtggtggtttatatttgtaattttaatattttgggaggtggaggcgggtagattatttgaggttaggagtttaaggttggttgatatggtgaaattttatttttgtttaaaaaaaaaaaaaaaaaattagttagtgtggtggtatgtatttgtgattttagttatttagaaggttgaggtataagaattatttgaattcggtaggcggaggttgtagtgagtcgagatcgtattattgtattttagtttgggtaatagagtaagattattttaaaaaaaaaaaaaaaagagtaagtgtttgttttgaaaatatagcgagtgtgtgaatgaggtggttcgggtacgatgtgaagtgtgcggagtttatatgtgtatgtgtgtgtacgcgtgtatgtgtatatgagggtgaacgggagatagatgagggtatgcgatttattttagtaatagagattttaggtattattagagtttagtattagtatgtttgttggtggttttgtatatatatatagatgtatttggatatatatatgattgataggtagttataggaagtatttttggaggtttagatggtacgtatataggatggatattatatacgtttagagagatagttatttggattgtttttttttttggatggttgtaataatatttgggtattttgttagggatagggttattatggaaacgattaaatagtggagtatttagtagttttttgcgtaattgtaaaggggggatttatgtagggagggttggtcgaggttattttgcgtggggtgggaatttttttttttttttagattttcggggtcgttattttttcgttatgtttttgggtttgttgtaggattggtttgtgtttttttgtttgttttgtaatttggtgttttttttatatgtggtttttgtgtttttgtatttttttcggtttttggttaggttttttgagtttttgttggttgtttgggttttggttagatttattttggggtttttatagaaattgttgatttcggttgtgaattttttgttttagaaaatttagtgtggtggttttagaaatttttttggaaaggagagaagggtgtgagtatgttgtaaaggagttgttggggtttggttatttttttaagttttatttttgggtttttattttgggaaagaggagggagggttgttgttttttttaggtgtaggtttggtttgatttttttattaagaaggaagtacggtggttaatttagagtcggattttttatttttttggattttgttcgggtttggttggtgtcgagtaggcggtttggggatagagtattttttgtttagttttggtaggtatttgtgagagtttgtggtttgttattggatagtttgtgaataggtggtagaggcgttattagggtaggagatagtgggagagtaatagtgattatgtgggggggatttttgtattgtgtatgaaaggggggtttttggattttgtgtgtttgtggatagggagtatttatgtaggcggttgtttattagggatattggtagggatttttgtggtaggggtatagtttttttgtttaaattttttgagtttagggttagggttggagttgtacgtttttaattttaggtatgtaaggattttttttgttttttgtttgagttttaggtttggaagttaaatgattagcgtatggtggattttttgggagtagtttatatttggtagattttagaggagggaggtgttttaaagtttaggttggatgtagagttagaagtataagtgatggttgcggttttttaatttagggtagtttgtgtttatggtgtttttagggaagattttttggaggaggagtgaatggatggagtagataggaggttgggacgtagtggaaggattaagtttgaggttttgtatttgggtggaggggttgagggagtaaggataatttatttttttttttttttattttttgaagttttaggttagtggttgttttatttaagtttttttttagtttttaggatgttttaaatgtggattatgtgagtgaatacggattgggattggagagttttgtttttgttttttttttttagatagagtttcgttttgtcgtttaggtttgagtgtagtggtataattacggtttattgtagtttcgattatttagatttaagggattacgtgaggtaggaggatttttttgttatagttttttaaaatgttgggattatagatatgagttattgtgttcgatttgggattggaaagagttttaaaaattttttttttttttatttttttgtttttttatattttttggggagttgggtagtatattttgtggtttaattttagtttttttttttgttttttagaggaagtttaattttgttgtttaaggttgtgtgattttttagagtttgggtatttaatgaatttttagaggtggttagaaagaattagttatatgtatatttttagtttattttgaaggtagagaagggttttgggtttagggagagatgtgttggtggggggaggtgtggagtgaagcgtaagaggggttgtcgaggttttgggttttttttttttttttttttttgagatagatttttattttgtcgtttaggttggagtgtagtggtatgatttcggtttattgtaagtttcgtttttcgggtttacgatatttttttgttttagttttttaagtagttgggattataggtgtttattattatgtttggttgatttttcgtatttttagtagagatggggttttattatgttagttaagatggttttaattttttgatttcgtgattcgttcgttttggttttttaaagtgttgggattataggcgtgaattatcgcgttcggttaattttgggtttttgattttattttcgttttttagg

SEQ ID NO: 326 - DNA, 11187 bp, Artificial Sequence
  chemically treated genomic DNA (Homo sapiens)
tttgggaaacggaagtggaattagaaatttagagttggtcgggcgcggtggtttacgtttgtaattttagtattttgggaggttaaggcgggcggattacgaggttaggagattgagattattttgattaatatggtgaaattttatttttattaaaaatacggaaaattagttaggtatggtggtgggtatttgtagttttagttgtttgggaggttgaggtaggagaatgtcgtgaattcgggaggcggagtttgtagtgagtcgagattatgttattgtattttagtttgggcgatagagtgagagtttgttttaaaaaagaaaagaaaaaagaaatttagagtttcggtagttttttttacgttttattttatatttttttttattagtatatttttttttgagtttaagatttttttttgtttttagggtgggttgggggtgtatatgtggttggttttttttggttatttttgagagtttattgggtgtttaggttttggagagttatatagttttgagtaataaggttaggttttttttgagaagtaggaggaaagattgaagttaggttataggatgtattgtttaattttttagagaatgtgaggaggtaggaaaatggaaaagaagagggtttttaaaattttttttaattttaagtcgggtatagtggtttatgtttgtaattttagtattttgggaggttgtggtaggaggatttttttgttttacgtgattttttgagtttgggtggtcgaggttatagtgagtcgtgattatgttattgtatttaagtttgggcgatagagcgagattttgtttaaaaaagaaaaataaaaataaaattttttaattttaattcgtatttatttatatggtttatatttaaagtattttaggaattaggaggaaatttagataaagtagttattggtttgaaattttaaggaatagaagaagggaaaaataagttatttttatttttttaatttttttatttaggtgtagggttttagatttgatttttttattacgttttagttttttatttattttatttatttattttttttttaggaagttttttttggaaatattatggatataggttattttaagttagaaggtcgtagttattatttgtgtttttggttttgtatttagtttaagttttggagtattttttttttttaaagtttgttaaatataggttgtttttagaaaatttattatacgttaattatttggtttttaggtttgagatttaggtagggaatagagagggtttttatatgtttgaagttgggaacgtgtagttttagttttagttttggatttaaagagtttaggtaaaaaggttatatttttgttataggaatttttgttagtgtttttgatggatagtcgtttgtatgagtgttttttgtttataagtatatagggtttaggaattttttttttatatataatgtaggaattttttttatatggttattgttatttttttattgttttttgttttggtgacgtttttgttatttgtttataggttgtttagtgataaattataggtttttatagatgtttgttaaagttgggtagaaagtgttttgtttttagatcgtttgttcgatattagttaggttcgggtagggtttagagaggtgaaaagttcggttttggattggttatcgtgttttttttttggtaaagaaattaaattaaatttgtatttggaagggatagtagttttttttttttttttttagagtaaaagtttaggggtggggtttgggagggtggttaagttttaatagtttttttataatatatttatattttttttttttttttagaaagatttttaaagttattatattgagttttttaggataagaaatttatagtcgggattagtagtttttatagagattttaggatgagtttggttaggatttagatagttaatagaggtttagggaatttggttagagatcgaaagagatgtagagatataaaggttatatgtgggagagatattaggttatagggtagatagaggggtataagttagttttatagtaagtttagagatatggcggagaggtggcggtttcggggatttgagaagggagaggggtttttattttacgtagggtggtttcggttagttttttttgtatgggttttttttttgtaattacgtagaaagttgttggatattttattgtttggtcgtttttatagtaattttgtttttggtaagatgtttaaatattattataattatttagaggagagaataatttaagtggttgtttttttgagcgtgtgtaatatttattttgtgtacgtgttatttgggtttttaaaggtattttttgtgattgtttgttagttatatgtgtgtttagatgtatttatgtgtgtgtgtagagttattaataaatatgttgatgttgagttttgataatgtttggggtttttgttgttggggtaaatcgtatgtttttatttatttttcgtttatttttatatatatatgtacgcgtatatatatatatatatgtaggtttcgtatattttatatcgtgttcgagttattttatttatatattcgttgtgtttttaaagtagatatttgtttttttttttttttttttgagatagttttgttttgttgtttaggttgaagtatagtggtgcgatttcggtttattgtagttttcgtttatcgggtttaagtgatttttgtgttttagttttttgagtagttggaattataggtgtatgttattatattggttaattttttttttttttttttaaatagagatggggttttattatgttagttagttttgaatttttggttttaagtgatttgttcgtttttattttttaaagtgttgggattataggtgtgagttattatattcggttgatatttgtttttaagaagaattttatagtcgagagttttatattgcgaatggttgtattttttatttagttattttttcgagtatttttgagaatttagttttagtttgtttttttggattttttttagatacgaggtttaaggtggtgttgattgaatgaaacgttgttttttttttagtttaagaaaataagttttttgttatattttttgttttttttattttatttttataggttttgattgttatttttggggttgggggtggggagaagtattgattggttttttatttgattgttatggttatttgtagggttttgttagtaggtgttaagagtaatgtaaataggagttttgattttttagagtattttttttttatttttttattttaggaggttttaggtcgcgaatttttgatatttagtttttttttcgttgtattggttggtgtgttgtgagaaggtgagggaaaaaggggtgatgggtgattggaaatttagttgttattattttgaggaagaggttgggagatgggaagaattcgagggagaaagagtgggagatatagattttaagaaatagaaaggggaggttaagtattattggaagtggtttttgtagagtttaggtgttttaataggttagttttaattgtgtgtttatttttttttggatttgagtattgtttttatttttaatattatttttttttaagtagaagttaagttttttagtgttttttgttattgtttttgtaagggtgtgtgtgatttttaggtagtttatattttgggttttgaggttttgggtttggttattgttaatgtggtaggaagggagtttgtttagtatttagtatttaatttcgatttttttttgttatttaagtttggtatttgttttttttaatttttaaagatttttgttaagaaaatattattattttttttttttttttttttttttttttttttttgagacggagttttattttgttttttaggttggagtgtagtggtaagatatcggtttattgtaattttcgttttttggattgaagcgatttttttgttttaattttttaagtagttgggaatataggcgtgtgttattatatttggttaatttttgtatttttagtagagatagggttttattatgttggttaggttggtttttaatttttggttttaagtgatttgttcgtttcggttttttaaattgttgggattataggtatgagttattatatttagatttatttttttattttaattagtgtttttttggaagttattttgtaatttaggttttttttatttttttatggttttttgtggaaatagtgggttttttagttttaaggtttttgtgtttttttgatgttatagttttttttgttttttttgtttttaaatgaaattagttttatttttttattagaatgtttttaggttttgggaaaagttatttaaggttatatttagatgtttagaattgtagaggtgaaagggtttttagaaagtattttgtttagttgggcgtggtggtttatatttgtaattttaatattttgggaggttaaggcggatggattatgaggttaggagtttaaaattaggttggtaaagatggtgaaattttatttttattaaaaatatatggtggtttacgttcgtaattttagtatttcgggaggttaagacgggcggattatgaggttaggagatcgagattattttggttaatatggtgaaatttcgtttttattaaaaatataaaatattagttgggtgtggtggtacgcgtttttagttttagttattcgggaggttgaggtaggagaatcgtttgaatttaggaggtagaggttgtagtgagtcgagattgcgttattgtattttagtttgggtaatagagcgagattttgttttaaataaataaataaaaatataaaaattagcggagtatggtggtaggcgtttgtaattttagttatttaggaggttgagttagagaattgtttgaatttgggaggtagaggttgtagtgagtggagatcgtgttattgtattttaagttgggttatagagtgaaagaaattttattttaaaaaaagagaaaaagaaaaagaagtatttgtttaatttttttattttatagatgagtatatttagatgtgatttgtttaaggttataaagtaaagtagtggtagttttgtgataagaaagtgtttgatttttattttagtgtttttaatattttggtatttggttaggttttttatttatttaaagtagtaatgttcggttttattttagtaggtgggaggggaaaagagtagttttttggagtggcgggaaaattatttagtgggtcgtcgtttgggagggagttagtttggtttaaatatgattattagtatggatttttgttttgaggtaggaagaggaggtatatgttaattgttttattttattttttatatatagggaaatagaggttgtagggaagtatagttagttagagtatagtattaagatttagattaggggttttatgattttgttttttttttagtttcgtgggtttaattgcgtaagttttttgtatttgtgtttggggtcgtgagggtttgtttagggatattgtgaattttttaattttttttaatttttgataatggtataaagatttgtttttttgtttttattatgtattgaaaagggttttttgaagttgggtttatttaatttttttttttttttttttttattttttaattttttaagattaaataaaggtaaaattttaaaatatatatattgttagatatatatatatatagtaagatatatttttttttattttttatatttattatatataaggttagatagatacgttataatttttttttattttgcgttatatatatatataattatagttagattagagttaggtttattttcgttatatgtagaagttatttatatttattttttatttagaagtatatagtttgatatttttgtttggaaatagattttgtaaatatatattaattttttgtacgattttggtttatttagggtaaattataatataagttttttagtaataaaagtagtttagtttttaaagttcgttttggggattagaggttggagggttgtagtgggtatgtgatttgtataaagttgtattttttttttgttcgggttttttttatttttatgataatagttttattaattaagattttttaggtaaggttaggggtagtagagtttttttttttgtttaatttttaagattttaatttgaattttatttagttatatatggtttggattttggggttggttttttgttttattttaaagttagttttaaagttttaattttttaatttttaattaggggagttcgtgggaaaatttttttattaaaaagttgtaatagagttggttttatgtttttagtaataatattttggattagagtgaaggggggagggaggagagaaattaaagagttttaggaatagaaattgttagaggttttagaggaggaggtattagaatagagcggggaggggataattaggagatagtttttttttcgagatagatttttggggagattgaggtagtatgggggatattgagggataaagatttcgggaagcgttgggtaatatttttataatatttattggtaaatttattcgtttttatgtcgtttttttttattttaagttaatcggagcgattatgggtagataggggtagtgggggagggcgaggggtagttcgggtttatcgtggagataggtagggggtgtttgtttgttcgggggttttacgtttttagagttagtagtaggagggcgtgcgtagggtggggtggttgggcgttttaggggaaggggggttagtttagtagatttttttgttttcgttggcgatgggaaatattgcgataaatttttttttatttttattttatttttagcgttcgggtttttttaggagtttatgtttaaggattagggattttagttatcgggtggtcgtttttattttttttagagttaaattttttgcggggtttcgggaggggtgtttcggagggaggttttgttgaggtggttcggggagggggcggggcgtcggcgtcgggacggggagcggggatcggcggggggaggtgttcgagaggattcggatttcggcggggaagggcgttttttttcggtttcgcggtcgttttaaagtatatttttttttgtcggttttaagttttcgcgcgtttacggcgtttttgtgtttacgggagagcgattttcgtttagatggaaaagggggtagatcgggtagagcgagaggcggttttggttcgtggggagcggcgatttaatttagcgcgtatttcgtaagttttttcggttgtttcggattttttttttcgttatttcggaatagggtttgttcgggggttgttgtataaagaggtggtggtcgagggagacgttaaatcgttaagacggggagttcgtttcggttattttggaagagaggaaagggaaaaagggatagaaaaaagggagaaagaaaggcggacggggtaagttgggttagggattgacggggcgcggggggtgcgaaggtaggatcggtttagagttttttttttttatcggggtttgcgaagaacggtcggtttttattttaatttttagagggttataggttaggagagggaaaggtagggggagttcgtttcgtttatttgggttcggggttcggtgggtttcggggagggggggatgggagggagggagggaagggaggggaggggggtcgtagtcgtgtcgttcgttcgggcggcgggaggggagaaatttacggtaagaaaggagtttgtgaaagcggtttggggtgggagggagaggggaggggaggggatcgaggggggaggggagggatcggagtgtgggggggagataaaatggttttttttttttagataagagtaggtttcgtttattatttatttacgtgattttatttttttaggatgttggtagagacgggaagaggagggggaggttggcgcggtcgtttttcgttatcggttgtcgggtttttagttaggacgagatttttttttttttatgcggtcgtttcgatttcggaggatggatttttttatgttatttttcgtagttagtttttttttttttaaaatatgggttttttttattgatattgtgatgtttatttttaattggggcgtttggaaaatggtgaaatggggattgggttgaaaggtggttcgtggttttttacgtttcggtttagattaaagggcgcggggtttcggcgggggacgcgacgtttttagttaggcgttcgagcgatttttatttattttaagtgatatttttttaaaattaataattgtatttgggagggcgagcgtgttttttttattttttttgttttttcggcggtaggggcgttggtttcgaaaagcggcgtattaggatttagtttgggcgtttggtagggagtaatcgcgagaggggagtggaggtgcggggtgaggtcgggtggggggtttcgtcgcggggggatcgggtagttttggcggaggttgcgttttcggcgtgttcgggtagagaagaacggaggttcgttgaggatgggaatttaggtttcgggtttgggatataataattcggtcgaaggcgagcggttatattggattaggaaacgaggcgtcgggttgtaaggtgggttcgcgtttttttttttgtttggcgttgattttcgtatttttcgttcgcgttttgcgttgcgcgttgtttgtgcgtttttttgggcgcgcgggcgggagagtcgggcgagcgttaagacggttgggttcgatttttattggcgtttcggttttatttggcgttggggtttcggttcgtagtggtttcggtaggagggagagaacgaggagggaggtttggaaacgtcgggagtagcggtgaggtcgacgtcggggaagcgaatcgatattgcgttattggacgttcgtgggttttatgaggatggtcgatttttttattcgttatttacgatttattagggatggcggtcgcgtttgtttttttagagagttcgattatttattcggttagtagcgttattaagcgtattgacggtgggaggttcgagttagaaattaggataggaattttcgtttagttttggagcgtttgtttttttttttttcgttgttcgtagttaaggtagtcgcgaagttgggggtttcgggtgaatgttttcgttttttggtcggcgattaggagatttgcgtatattggtcgtcgagtgattttagttcgagtttgtagttatattagcgggacgggggcggggaggaagaggaagggcggagagatttttttttagagggagtggttcgagaatcggcgggagaagggttaagggaagattcggttatttgtttcggagtttgtaggcggagaggcgagtagtttatcggtttcggaggaaaggggatttttttattgtttttaggtaaatgtgtcgtcggtattttgtattttgtcggggaagacgcgtatttattcgttttgtagggaggggaacgcgggaaggatttttagttagtcgtttttttttggttataagatttcgaataagagaaatttgtaataggggttttgcggagatttggattttatttattaattatatgggtatttggggggttgtttttcggggtattattagttagtgggaagggggttgacgtttttttgcggtttatgaattttggagggttgttcgaggggttatcggggtttatttatttatttttcggttgttaagcgttagataggagagaatcgttagagaggagtgtgttaagattttattatttattaaaattttatttttattttttgcgttttggatgattagtttttatatttttggtttttttggttttttaggagaattttttgatttaattttttttatatcgaaagagttttttagttttttgttttattattagtcgatatagaaagtatttgttatgtgttagtgttaaatattgcgttaggaattgggaatttaaggtataggagtttggtttttgcgtagggcgtttataggtcggtgggtgtaaattttgaaggatatatagtttgtttttttagcgtttatcgtttttggtgtgagttttcgttaagggtgggtgagtattggggtgggtttttagaagaggttttttttgagtcgaatttgtagagattaagtgtttatgagaattgtttaagagtgttttgtatatttttttttataaaggtcgaggtttttattgcgtttaggaatgcgtttcgttagatattaggcgttttttgattttgtgtttgtattttacgcggttttttagttgataagtgtattagaagagttatagtggttgttataagttagagattcgtagaggataggaacgcgggaaatttaggtaattatttttagtatatattaagagttattgcgaggattagatttttttaaaaatggtgacgagataggagagggcggtttttttagagtttttcggaacgtttttatttttgtgttttttatattttttattttttttaaataaggtttttagttagtttttttttttatttttttattttttttttttatttttttgtgtagttttagggggaaaaaatgtgttgtttttttttttttttgatgtttttaatattaaatgcgtttatttttttattttttattgttttgaggtttttttttatttattttgtttagttttgttacgttttttttttttttgtattataataatgtttttttttttttatttttgtttttttttatatttgtttttttttttgtgttttttttattttttttttttttaaatgtagtatttggagattgtaatatcgattgaggtagataatagaaaattgtcgaatttttattgtaaatttatttttaattttatgaaaaaatgtattttgaaacgtgttgtatgtatagtgagataaaaatttgtgtttttaggttttttgcgatttagtttggaggcgggttgggggggtgtggagggaagtgttggagaaattattttattattgattgagtagtaa

SEQ ID NO: 327 - DNA, 10467 bp, Artificial Sequence
  chemically treated genomic DNA (Homo sapiens)
tgtttttatgagaacggagaatatatgtttatataaaattagaaatgtttatagtagtattttttataatagttaaaaagtgtaaataatttaaaggtttattaatggatgagtggataaataaaatatgtgatatatttatgattgtagtcgtaaaagggttaaatattaggtagttataaaagggataaattattgatataggttataatatggatgaattttgaaacgtgtttagtgaaagaagttaggtgtaatagaatataatgtttgattttatttatatgaaatgtttagagtaggtaaatttatatagatagaaagtagattagttattgttaggggttgggatatagaggtgaatggagaataattattaaatgggtatagaattttttttggaataatgaaaatgttttggaattagatagtggtgatggttgtataattttttgaatatataaaatatattaaattgtatatttaaaaatatgaattttattatatatgaattatattttaatataaaatataatgtaaaatataaaataatgggaaaggtttgttagtaatgagttaggttaaaaaaaaataataaaggaataataataatatggtaatattataattttttggttttaaatttattaaagaaaatgaataaattttttgaaaaagataatttattaaaaattgatataagaagaaataaaagttaggaaggtaaaaaataagtaaaaataaataaaagaagaaataaaaatgttgaatatttttataatagttaaaaaaattgaattagtaatttaaaatttttttatgaagaaaattttaggttaagatagttttttttttttgtttttttgttttttttaaggatatatgattgtgatttagttttaggaggttttgacgttatgtgtttcgggatagttttaatagaagagaaagttaaggaaattttttagaaggcgagtaaaaagataaagaagattagtttaagaggtttagaatttatgaattttattaaatatttaagaaataatgttaattttatataagtttagaaaatataggaaagaatagtttttaatttattttgatgaatacggtatgattttgatagtaaattttgataaagatattataagaaaattttagattattattttttatgtatatagatgtaaatatttttaataaaatattaataaattaaatttagtaatttataaaataataatgtattatgattaagggggtttattttaggaatgtatggttggtttgatgttttattagtataatttattatattggttaaattaagaaagaaaaaaaattatgattagtgttgtttagaaaagtattgataaaataaaagagagtattttaataataaaatgattatagttattatggaaaagatagaaattttgttagaattttttatatttaatttttggttaagaatagatttttgtttgtttgtttgttttaaaattttattatgtgggggtatgggtattatagttttttttatattttaggaatgataattttaggattttgtttgtagtcgtttgtgtgattgtaggttatttagatttttttggttattttttaaatgagaaaaggaatagatgttttttataaagtgttgaggattggagtattgggtgttagaattatatttataatttgattttaaattttatgaattgttattggtagaaataattggtagattatatttgtagataaagtttattattttatttaatttttttagtttatagatgtagagtgagaatttgattaagatagttagttatttgttggattaggttatatagtttttttttgattagttgggttatatttgatttgataatattgttttattgtggttattgatgataaatatattttttagttttggggatagtttttggatttttaaagtttatttaaggattaatatttatgatgttttaattttgtttatattattgtaatttatgtgtgtttaaataaaataaaataaaaaatataaaagaaataaggtcgggtattatttagtacggtggtttatgtttgtaattttagtattttgggaggttaaggtgggtaggttttgaggttaggagttcgagattagtttggttaatatgatgaaattttatttttattaaaaatataaaaattagtcgggtatggtggtgcgtgtttataattttagttattcgggatgttgaggtaggagaatcgtttgaatttaggaggtggaggttgtagtgagttgagatggcgttatcgtattttagtttgggtaagatagagcgagatttcgttttaaaattaaataaaatcgttgggatttacgtgtgttttttttttttttttttttttttttttttttttttttttttttttttttttttttttttttttttttttttttttggtggagttttattttgttgttgaggttggagtgtagtgttacgatttttgtttattagaattttcgtttttcgggtttaagtgatttttttgtttttttgttttagttttttaagtagttgggattataggtgtttgtcgttatgtttagttaatttttgtatttttagtagagatagagtttttattatgttgattaggttggttttaaatttttgattttaagtgatgtatttgttttatttttttaaagtgttgggattatagatgtaagttatcgtgacgggtttatgtgttatatttttattttataatattttatgaagaaggtattattgggatttttattgtttagatgaggaatttatatttttagtaggatttgatttttttttatatttttttttattgttttatgttgttgttttttttttgttttagaaggtaggtttaggtttgatttatattttatttatttagtatttagtttgttgtatgtttattgtatagtaggttttagtaaatatttattgtatggaatttgataaagtatggtttttttatttatttttattggtttaataagtttttttaaattaattagtttggaaagtgaattttatattttggtatgaattattaggttattttatttatgataaataggttagaggggattttatagtgttttttggaaattgttttatttttttttttggaggtagtattttatggtaggaaatttttggttttggaaagtagatgggttgtgtgttaatgtttatttttagatatattatttagtttttttaagttttagtttttttatttgtaatttttttttttttttggtgaaatgagattttatgtatagtttttattttttatttttttatttttttgttttttttttttttgtgtaaataagatgtgggataggtttatggtggtttatgtttgtaattttggtattttgagaggttgaggtgggagggttgtttgaggttagaagtttaaaatgagtttaggtaacgtatagagattttgtttttataaaataatgtttttaaaaattagttgggtgtggtggtacgtgtttgtatttttagttatttgggaggagtgtcgtattttagataatagagtaaaattttgttaagaaaaagaaagaaagaaaaaaaaagaaaagagaagagaaaagaaaagaaagaaagggaatatataaaaggtaaatggtaaaaggttttaggggaaaaggagtttgtagaataagaattagggggattaggagtgagtgataatggggaggttagcgattttgagttatagttttagttttgttttgtataaattgagatttttatttttaaaatggattggtagttttgtaggggtttataaggattataagagataattatgtgatttatttagtatataaaaggtatttttttataaatagtagttattataaggtaatttaagatatttattttttttttattttgttatttattttgtttttaaagtaaattttaattaattttttttaaaatattatttttttttttgttattatttttttttttttgaatatttttatttttttgtttatttatatgttttgtagttaagttagaggagggaaaatagagtaaaagaaaatattaaaggaagtaagtttaaattaataattttgagaaaaatatttaagttttaatattgtgtgtgtgagtgtgcgcgcgcgcgatagagagaaagagagcgagcgagcgagggagagagatagagagagaaggagagagaaagtttttgttaaattgggtaattttaaattttaggaaagtagaaatgggaatttttataaaagtatgatatattagtagaatggaaagaaattattaggtttaaatttgagtgtgtgattacggtttttagtttttcgggattgtatgttcgtatgttcgagttcgggaagaggaaagaggaaggattaaaaaaaagaaaaaagaagaagaaaaaaagtattgtggtttaatagtttttttttatttttttaaaggttggtttataatataattagcgttgttagcggggacggtggggatatttttggttttagatgagtgttgggaaggaggggatttgtttcgagcgtaagtttgtgcggaagcgcggttggatttgggttttgaattcgggggttcggggttttgtatttaggcgttagtttttttattcgtagagtggtttttagaagttttcgggtggtcgcgaggatgttttaaatttcgggggttaaggtcgagttcggcgtttcgcgtttagttcgcgggagtttttggggatcggagcgcggtcgattttcgttagtttatgggcgattgggattgcggtgttcgtaggttttcgggagtatttcgcgaggttcgtttagttttcgtcgttcgttttttcgtattttacgtgattttttgacggttttagggattgtttttttcgagttaggtttcgttttttcggcggtttcggagcgcgggtgtagtagttgtgtttcgatttttgggagcgttatggtagagttgtgttttttggtcgaggagttgtcgtgttttatttgtttggagttttttaaggagtcggttattatttcgtgcggttataatttttgcgggtcgtgtttgaatgagacgtgggtagtttagggttcgttatatttgtgttcgtagtgtcgcgtcgtttattaggcgcgatcgtagttgtataagaatacggtgttgtgtaacgtggtggagtagtttttgtaggtcgatttggttcgggagttattcgtcgacgtttggacgtcgttcgttcgcgtttttgtatttagttcgaatgtttaggtggtttgcgattattgtttgaaggaggtcgtcgtgaagacgtgtttggtgtgtatggtttttttttgttaggagtatttgtagtcgtatttcgatagtttcgttttttaggattattcgttgtagtcgttcgttcgcgatttgttgcgtcgtaaatgtttttagtataatcggttgcgggaatttttttgtttcgagtatagcgagtgtatttgttatatttgtttggtggagtataagatttgttttttcgcgtttttgagttaggttagcgtcgatttggaggtagggaacggtttgttgggtgtagagggtagtttggtttgatgggtggtgtagaggggttatcgggggtttttttgttatattttggacgttttggggagatgggtttgaattcgaggtcggggtatttttaatgttagagtagaaaggggatgggagattatatagtttttttttattatttatgaagataggttaggttgtttgttataattttgttattgtttgatggtgtttatttttatttttttgagatagggtttcgttttttttatttaagttggagtgtagtggcggaattatagtttattgtagtttcgatttttcgggtttaagggatttttttattttagttttaagagtagttgggattatagttttttaagtagttgggattataggttcgttaattttttgtagagatgaggtttcgttatgttgtttaggttggtttcgaatttttgagtttaagcgatttgtttatttcgattttttaaagtgttaggaggtttttaaaggcgtgtattattgcgttttattatttgatggtgtttagtagagggttttgaatgttaattatgaacgttggaggttatttttgtttttttacgaagttttggtggtatttaggaggtggatatgatttagttttattttattgttgaggatattgaggtttagagaaatgaatttagtttgatttaatgtagtaaatagttacgtaggtattgtgattcgggttggttcgattttatagtttgtatttttttttatggattagtttcgtatttaggttcgtagagttcggagtattaaatagtttaggaagtttgaggttatgtaagtaaaagtttttggtgggtcggagagtttttgtgattaggaagggttgttattagaggtttaagagggagggtgggtagcgttttagtaattattggattagagttatagggagagttaatatttttgtattatagtgtttttcgttttggtcgtgtgattttgagtatggggtttggtttttggatttgggtttttattagtatagtgaggttgtgggattaggtggatttttaagggttttttaggtttgtaatgtttttaggtggtttggggattatattttttttttgtggttttaaagtagaggttgaaattaaattattttttgttatattagtttaagatttaaagtatggtttgattttattttatttttatagtatttttagggagaataagattcgttttcgtgttgttagaggagatagtagtttgagtaaggttagagttgggggtttgtatttagttttgtgtagtatataaatttggttttttttttttttttttttagagatagggttttgttatgttgtttaggatgtttttgaattttcggttttaagggatttttttattttagttttttgagtagttgggattataggtgtgttatcgtgtttggttttaaatttggtttttttttttttttttttagagataggattttattttgttatttaggttggagtatagtggggtgattatagtttattgtaattttaaatttttgggtttaggtgatttatttgttttagttttttgagtaggtagtattataaatgtgagttattatatttggttaagttttaaaaaatttttttgtaaagatgggattttattatgttgtttaggttggttttgaatttttggttttaattttttttttattttagttttttgagtagttggaattataggtgtgttattacggggtttggttataaaattagaattttttttttttttttgagttggagttttgttttgtcgttaggttggagtgtagtggtgcggtttcggtttattgtaatttttatttttcgagtttaagcgatttttttgttttaatttttcgagtagttgggattataggtttgcgttattatgtttagttaatttttgtatttttagtagagattgagttttattatgttggttaggttggtttcgaatttttgtttttgtgatttattcgtttcggttttttaaagtgttgggattataagcgtgagttattacgttcggtttatatatatatattttttaatttttttttttagagataggtttttatttagttatttaggttggattatagtagtatgattatagtttattataattttaaattttggatttaggtgatttttttgttttagttttttgagtagttaggattataagtacgtattattatatttagttaatattttaaaatattttttgtagagacgggattttattatgttgtttaggttggttttgaatttttaattttaagggatttttttattttagttttttgaagtgttgggattataggcgtgagttaggagtttggtttaaattttgttgtttaattttaataataggtttttttttgttaatatttatttttttgttttgatttgttgagttttataataggtttgttttttgagttttgttattgttgtttattattgttggtagagttagttttagttgggtaatgtttttagttttaggggttgggttgttttggttattggtgggggcggatttgagattttggtgttttttatgtggaagatttaagtttttagtttgtgaagggatttttaggattttaaaaagttttttgtttttgattaggggattattgttgttattaaagtttttgggttatttttttttggtttggagtcgtgtgggtattatttatgatgagggtattgtcgtatgtgtttgattaatggtgtattaaattttttaaaatatagggtttagggtgtagtgttatgagtagtttttgaaagtgaagtagttggtagttttggggtgttttgaggtttttttttgttttgaggttagtaaggtcggatgtatgtaggtttggtttttggtttatattttattttggttattgttagaggttaggtcgaagggtagtgttatagaggttaagtttgaaatattatgagtagtttgggtttttcggattgagttagtgtggttttggtttttgtttttaatttttatatgtgattgttattgggttgtttaaatttagatttaagattaggtttcgtttagaatattttgggtggagttgaagagtttgggaagtggaagagagagttagagtatgttgagtttgttagttacgggaaggaaattttttttttttagaaatttttagtatgtttagtttgggtatgtgtttatgattttaatatcgggattttagttgtgttagttattagtagtgtagttggggtaagttatttaattgttttgtgttttagtgtttttgtttgtaaaggttgggtaatttttattttatagtgttgtttttagttttaagtaagttaatataggtaaagtattagaatagtgtttggtatatagtaagtgtataataaatattggttgttgttgttatggtggtggtgatttttttttttatttttgtgtagtatttatttgagtagggaggtaggagatttagatattgattatgaaaattaattgaaattagatgaggatattagttttttttatatatagtttgtttttgtttttggaggtggttaggattgagtagatttgtatttgggttttagtttttgtgagttattttattttttttttttttttttttgagatagggttttattttgttatttaggttggagtgtagtgatgttattttagtttattgtaggtttaattttttggatttaagcgatttttttgttttagttttttaagtagttgggattataggtgtgtattattatatttggttaatttttgtatttttagtagagatagggttttgttatgttgtttaagttggtttcgaatttttgagcgtaaatgatttatttgtttgggttttttaaagtgttaggattataggtatgagttattgcgtttggttggttgatttattttatttttagtttttggtggttttagtttgtagtgagttttggattttgatttttgtttttttgttttgtgaggttgataaaggtttttagttttgttttgggattggtagatgtttttggagagaatattttagatattaggtttatttttttgggtttttttttttttttttttggattttgattttttaattttttgtttgattggttttttagtattttttagtagattttttcgttgttttattatttggattgtttttttggttgtttgtagtgggaggattggtttgagtggttttatttgttattatcgaagtagttgttttagttcgttttgtttttgtgtgagtttggttatttttttgttttttttgtttgagttttattggttgtaaaatgggtaattagagaaaaatttataataatataagttggtatttagtatgttttttttaagatttaggtattgggttgagtatttatattgttttaattaatttttttaatagttttgtgagttggggatagttgtatttattttgtgtttaagaaaattgaggtgaaggatatagttgtatagttgggagttgggattggaattttggtttgtattgttttttgaaaaggatgaagggaagtagtaagtattagaatgttttaaaaagttttaagtaggtaagattcgggtgataggatttggggtggtaagatttgggtggagtggaagaggaaggaatttattttgtgggatagttttagggatggtttttggtggggttgggttgaagaggtgtatttttaattttatttgttttttttgtagg

SEQ ID NO: 328 - DNA, 10467 bp, Artificial Sequence
  chemically treated genomic DNA (Homo sapiens)
tttgtagggaaaataaatgaggttgagaatgtatttttttagtttagttttattagaagttatttttggaattattttataggatagattttttttttttttattttatttaagttttgttattttaagttttgttattcgagttttgtttgtttggagttttttgaagtattttaatatttattatttttttttattttttttagaggatagtatagattagggttttagttttaatttttagttgtgtaattgtgttttttattttagtttttttggatataaaatagatataattgtttttagtttatagggttattgggaggattaattgaaataatgtaagtatttagtttaatgtttggattttaggaaaaatatattaaatgttagtttatattattatgagtttttttttaattatttattttatagttaatgaaatttaagtaaggaggatagaaaggtggttaagtttatataggaatagaacgagttgggatagttgtttcggtaatggtaggtggggttatttagattaatttttttattgtaaatagttaggaaagtagtttaaataatggggtagcggggagatttgttaaaagatgttggagagttaattaagtagaggattaagaagttaaggtttaggagaagggggaagggggtttagagagataagtttgatatttaggatgttttttttagaggtatttgttaattttagaataaggttgggagtttttgttagttttatagggtagggagatagaaattagagtttaaggtttattgtagattgggattattaagggttgggaataagatgaattagttagttaggcgtagtggtttatgtttgtaattttagtattttaggaggtttaggtaggtggattatttgcgtttaggagttcgagattagtttgggtaatatggtaaaattttgtttttattaaaaatataaaaattagttaggtgtggtggtgtatatttgtagttttagttatttagggggttgaggtaggaggatcgtttgaatttaggaggttgagtttgtagtgagttgagatggtattattgtattttagtttgggtgataaagtgagattttgttttaaaaaaaaaaaaaaaaaagatgaagtagtttataggggttgaagtttaggtgtaaatttgtttagttttagttatttttagaaataaaggtaaattgtatatgaaggaagttaatatttttatttgattttaattaatttttataattaatatttgagttttttatttttttgtttagatgaatattgtatagaaatgggaaggaaaattattattattataatagtagtagttagtatttattatgtatttattgtatgttaggtattgttttagtgttttatttgtattaatttatttaaagttaagaataatattatgaggtaggaattatttagtttttatagataaggatattgaggtatagaataattaagtgatttgttttagttatattattagtaattggtatagttaagatttcgatattaaaattatagatatatgtttaaattgagtatgttggagatttttagaaaaaaaaaatttttttttcgtaattagtaggtttaatatattttggtttttttttttattttttagattttttaattttatttaagatattttgggcggaatttgattttgaatttagatttgaataatttagtgatagttatatgtaggggttggaggtagggattaaggttatattaatttaattcgaaaagtttaagttgtttatgatgttttaaatttgatttttgtgatattgtttttcgatttggtttttaatagtggttaagataaggtgtgggttaaagattaggtttatatatattcggttttgttggttttagagtaagaagagattttagaatattttaaggttgttaattgttttatttttaagagttgtttatagtattatattttgagttttatattttgaaagatttgatatattattaattaaatatatgcggtagtatttttattatgaatggtgtttatacgattttagattaaaggaaagtgatttaaaaattttggtagtagtaataattttttaattaaaggtaaaggattttttgaaattttgaggatttttttatagattagagatttgggttttttatatgggaggtattagagttttaagttcgtttttattagtggttaaggtaatttagtttttgaggttaagggtattgtttagttgagattggttttgttaatagtgatgagtagtagtaatagggtttaaaaagtagatttgttataggatttagtaagttaggataggggggtaggtgttggtagaggaaggtttgttgttaggattaaatagtagagtttaggttaggtttttggtttacgtttgtaattttagtattttaggaggttgaagtgggaggattttttgaggttgggagtttaagattagtttggataatatagtgagatttcgtttttataaaaaatgttttaaaatattagttgggtgtggtggtgcgtgtttgtagttttagttatttaggaggttgaggtaggaggattatttgagtttagggtttaaggttatagtgagttatgattatgttattgtagtttagtttgggtgattgagtgaaaatttgtttttaaaagaaaagattaaaaaatatatatatatgggtcgggcgtggtggtttacgtttgtaattttagtattttgggaggtcgaggcgggtggattataagggtaggaattcgagattagtttggttaatatggtgaaatttagtttttattaaaaatataaaaattagttgggtatggtggcgtaggtttgtagttttagttgttcgggaggttgaggtaggagaatcgtttgaattcgggaggtggaggttgtagtgagtcgagatcgtattattgtattttagtttggcgatagaataagattttaatttaaaaaaaaaaaaaaaattttgattttatagttaggtttcgtggtagtatatttgtagttttagttatttaggaggttaagatgggagaaggattgaggttaggagtttaagattagtttgagtaatatagtgagattttatttttataaaagaattttttaaaatttagttaggtgtggtggtttatatttgtagtattatttatttaggaggttgaggtaagtggattatttgagtttaggagtttgagattatagtgagttatgattattttattgtattttagtttgggtgatagagtaagattttgtttttaaaagaagaaaaaaaaaagttaagtttagagttaggtacggtggtatatttgtagttttagttatttaggaggttgagatgggaggattttttgaggtcggaagtttaagaatattttaggtaatatagtaagattttgtttttaaaagaaaagaaaaaaaaagttaagtttatatgttatataaagttggatgtagatttttaattttgattttgtttaggttattgttttttttgataatacgaagacgggttttgttttttttgaaggtgttgtgagaatgaaatgaaattaggttatgttttggattttaggttgatgtaataaaaggtggtttgattttagtttttgttttgaggttataaggggaaggtatgatttttaaattatttaaaaatattgtagatttgaaaggtttttaggaatttatttagttttatagttttattatattggtgaggatttaggtttaggggttaaattttatgtttaaagttatacggttaggacggaggatattatggtgtaagagtgttggttttttttgtggttttgatttagtgattattgggacgttgtttatttttttttttaggtttttaataataattttttttgattataggaatttttcggtttattaaaggtttttgtttatatgattttaagttttttggattgtttggtgtttcggattttacggatttggatacgaggttggtttatgggaagaaatgtaaattatgaaatcgaattaattcgggttataatgtttgcgtggttatttattgtattaggttaggttaagtttatttttttggattttagtatttttaatagtaaaatgaaattaaattatatttattttttgggtgttattaggatttcgtgagggaatagaggtaatttttaacgtttatagttgatatttaaaattttttattaaatattattagatggtggggcgtagtggtgtacgtttttaaagattttttagtattttaggaggtcgaggtgggtagatcgtttgagtttaggaattcgagattagtttgggtaatatggcgaaattttatttttataaaaaattagcgagtttgtggttttagttatttgggaggttgtggttttagttatttttgaggttgaggtaggaggattttttaagttcgggaagtcgaggttgtagtgagttgtgatttcgttattgtattttagtttgggtgagagggacgagattttgttttaaaaaaataaaaataaatattattagataatgataggattatggtaagtaatttaatttgtttttatggatgatgggaagggattatataattttttattttttttttattttgatattggagatgtttcggtttcgaatttaggtttatttttttagggcgtttagagtgtggtagagaggttttcggtggtttttttgtattatttattaggttaggttgttttttgtatttagtaggtcgttttttatttttaggtcggcgttggtttggtttagggacgcgggagagtaggttttatgttttattaggtagatgtggtagatgtattcgttgtgttcggggtagaaaaattttcgtagtcgattgtgttgggaatatttgcggcgtaataggtcgcgaacgggcggttgtagcgggtggttttggaaggcggggttgtcgaagtgcggttgtaggtgtttttgatagaaggaggttatgtatattaagtacgtttttacggcggttttttttaggtagtggtcgtaggttatttgggtattcgggttgggtgtagaggcgcgggcgggcggcgtttagacgtcggcgggtggttttcgggttaggtcggtttgtaggaattgttttattacgttgtatagtatcgtgtttttgtgtagttgcggtcgcgtttggtagacggcgcggtattgcgggtataggtatggcgagttttggattgtttacgttttatttaggtacgattcgtagaagttgtggtcgtacggagtggtgatcggttttttgaagggttttaggtagatggagtacgatagtttttcggttagggggtatagttttgttatggcgtttttaggggtcgggatataattgttgtattcgcgtttcgaggtcgtcgaggaaacgaaatttagttcgagaggagtagtttttgaagtcgttaggaagttacgtggggtgcgggggggcgggcggcgaggattgggcgggtttcgcgaggtattttcgggagtttgcgggtatcgtagttttagtcgtttatgagttggcgaaggtcggtcgcgtttcgatttttaagagttttcgcgggttgggcgcgggacgtcgggttcggttttagttttcgggatttagagtattttcgcgattattcggaggtttttgggggttattttgcggatgaggaagttgacgtttgggtgtagaatttcggattttcggatttagagtttaggtttagtcgcgttttcgtataaatttgcgttcggagtaagtttttttttttttagtatttatttgagattagaggtgtttttatcgttttcgttagtagcgttggttatattgtgggttaatttttaaaaaaataaaaaggaattgttaaattatagtgttttttttttttttttttttttttttttttaattttttttttttttttttttcggattcggatatgcggatatataatttcggaagattggaggtcgtagttatatatttaaatttaaatttggtgatttttttttattttattgatgtattatgtttttataaaaatttttatttttatttttttgggatttggagttatttagtttaataaaggttttttttttttttttttttttgtttttttttttcgttcgttcgttttttttttttttgtcgcgcgcgcgtatatttatatatataatattggaatttaaatattttttttaaagttattgatttaaatttattttttttaatatttttttttgttttgtttttttttttttggtttgattgtaggatatatgggtggataggagagtagaagtgtttaaaagaggggggatggtggtaaagagaaggatggtgttttggaaggagttagttggagtttgttttggggatagagtgagtagtaaaatgaggaaaaggtaaatgttttagattattttgtaatagttattatttatgggggggtattttttgtgtgttagataagttatatggttattttttataatttttataaatttttgtaagattgttagtttattttaggaatgagagttttaatttatgtaaagtaggattgggattgtagtttaggatcgttgatttttttattgttatttatttttggtttttttaatttttgttttgtagatttttttttttttaaaattttttattatttattttttatgtatttttttttttttttttttttttttttttttttttttttttttttttttttttttttttttgataaggttttgttttgttgtttagggtgcggtattttttttaagtagttgggaatataagtacgtgttattatatttagttaatttttgaaaatattgttttgtagagataaggtttttgtacgttgtttgggtttattttgaatttttgattttaagtaatttttttattttagttttttaaagtgttaaaattataggtatgagttattatgggtttgttttatattttgtttgtatagagaggaggaagatagaagaatgaggggataggaaatgaaagttatgtatagaattttattttattaaaaaaaaaaaaaaattatagatgagaaaattgaggtttagagaaattaaatagtgtgtttaagaatggatattggtatatagtttatttgttttttaaagttaggagttttttattataaaatgttgtttttaaagggaggagtggagtagtttttaggaaatattgtgaaattttttttgatttatttattatgggtgaggtggtttagtgatttatgttagaatgtggaatttattttttaggttggttggtttagaagggtttgttagattaatgaggatgaataggagggttatattttattaaattttatgtagtagatatttattaagatttattgtgtaataggtatgtaatagattgagtgttaaatgagtaagatgtgagttaaatttgggtttgttttttaaaataggaagaagataatagtataaagtagtaaagagaaatatggggagaagttaggttttgttaggggtatggattttttatttggatagtaagaattttaataatattttttttatgggatgttgtagaataaaaatgtaatatatgagttcgttacggtggtttatatttgtaattttagtattttgggaggatgaggtaggtgtattatttgaggttaggaatttgagattagtttggttaatatggtgaaaattttgtttttattaaaaatataaaaattagttaggtatggcggtaggtatttgtaattttagttatttgggaggttgaggtaggaaagtaggagaattatttgaattcgggaggcggaggttttagtgagtagagatcgtggtattgtattttagttttagtaatagagtgagattttattaaaaagagagagaggaaggaaggaaggaaggaaggaaggaaggaaggaaggaaggaaggaaggaaggaaggaaggatatacgtaaattttagcgattttatttaattttgagacggagtttcgttttgttttgtttaggttggagtgcggtggcgttattttagtttattgtaatttttattttttgggtttaagcgatttttttgttttagtatttcgagtagttgggattataggtacgtattattatgttcggttaatttttatatttttagtagagatggggttttattatgttggttaggttgatttcgaatttttgattttaggatttgtttattttggttttttaaagtgttgggattataggtatgagttatcgtgttgggtggtgttcggttttgttttttttgtgttttttgttttgttttgtttaaatatatatgaattatagtaatataggtaggattggggtattatgagtgttaatttttaaatgggttttggaggtttagggattgtttttagggttggagggtgtgtttattattagtaattatagtagaataatgttgttaagttaaatatgatttagttagttaaaagggagttatatggtttaatttagtagatggttggttattttaattagatttttattttgtatttgtaggttaggaaaattaggtggagtaataaattttgtttgtaaatataatttgttaattatttttattaatgataatttatagaatttaaggttagattgtgggtgtggttttaatatttagtgttttagtttttaatattttatgaaggatatttgtttttttttttatttgaaagatgattagagaagtttaaatgatttataattatataaacggttatagataaagttttaggattattatttttgagatatggaaaagattatggtgtttatgtttttatatgatgaaattttaaaataagtaagtaaataaaaatttatttttaattagaaattaagtgtaaagagttttaataaaatttttattttttttataataattatgattattttgttgttgaggtatttttttttattttattaatatttttttaaataatattgattatagtttttttttttttttgatttggttaatatggtgaattatattaatgaaatattaaattaattatgtatttttgaaataaatttttttggttatgatgtattattgttttataaattgttggatttgatttgttggtgttttgttaagggtgtttatatttgtgtgtatgagggatggtagtttaaaatttttttgtaatatttttgttaggatttgttattaaggttatgtcgtatttattaaaatgaattgagaattgtttttttttgtattttttgagtttgtgtaaaattggtattattttttaaatgtttgatagaatttatggattttgaattttttgaattggttttttttgtttttttgttcgttttttaggaaatttttttaatttttttttttattaaagttatttcggggtatatgacgttaggattttttgaggttgagttatagttatgtgtttttaaaaaaaataaaaaaataaaaaaaaaaaattattttggtttggaattttttttataagaaggttttaaattattaatttagtttttttaattgttataggaatatttagtatttttgtttttttttttgtttatttttatttattttttatttttttggtttttatttttttttgtgttagtttttggtaagttgttttttttaaggaatttgtttattttttttaatgaatttaaggttaaaagattgtaatattgttatattattattatttttttattatttttttttaatttggtttattattgatagattttttttattattttgtattttatattatattttgtattgagatataatttatatatgataaaatttatatttttaagtgtataatttaatgtgttttgtatgtttaaaaggttgtataattattattattatttaattttagaatatttttattattttaaaagaaattttatatttatttagtagttattttttatttatttttgtattttagtttttggtaatgattagtttattttttgtttatatggatttgtttattttggatattttatataaatggaattaaatattatgttttgttatatttggttttttttattgagtacgttttaaagtttatttatattgtaatttgtattagtaatttgttttttttatggttatttaatatttggtttttttacggttataattatagatatattatatattttgtttatttatttatttattgatggatttttgggttgtttgtattttttgattattataaagaatattgttatgaatatttttggttttgtatgaatatgtgtttttcgtttttatggggata

SEQ ID NO: 329 - DNA, 7138 bp, Artificial Sequence
  chemically treated genomic DNA (Homo sapiens)
tttttttgtatttttagtagagatggggttttatcgtgttagttaggatggttttaattttttgattttatgatttgtttgtttcggttttttaaagtgttgggattataggtgtgagttatcgtatttagtttttttttttttttttttttttttttttgagatagggtttttttttgttatttaggttttagtgtagtggtgtgattatagtttattgtagttttaaattttttggggttaaataatttttttgttttagttttttaagtagttggaattataggtatatattacgtttagttgattattattatttttgtttttgtagagatattttttttatgttgtttaggttggtttcgaatttttggttttaagtaatttttttgttttgtttttttaaagtgttgagattataagtgtgagttattgtatttagtttttggtgtattttttaatgtttatagttatataatgttgtaaaaatggaattatgtaatatatttgttaagcgtatgaagtattttttttttaattttggatttttaggttgggtttggtggtttacgtttgtaattttagtattttgggaggttgaggcgggcgaattatttgagattaggagtttgagattagtttggttaatatggtgaaatttcgtttttattaaaaatataaaaattagttaagtatggtggcgtatgtttgtaattcgagttattttggaggttgagttacgagaatcgtttgaatttaggaggaggaggttgtagtgagttaagattatgttattgtattttggtttgggtgatagagtaagattttattttataagaaaaaaaaaaaaaaaaagttggatgtttaagatgtgttgggtaatttttagtcgtttattttattttgtaatagagtatgtgttgtgtatttttttgtagtttttgttatgtttagataattatatgtaaatatgtatatatttgtatggggtttgtgttataaaaataaagttatgttatatgtatttttttgttaatatagaatagtagttattttaggttggttggtatgaattaatagttttttaaagttgtttaatattttaggttatgggttttttaatttagtcgtttatatattgatggaaatttattttgtttgtttatttttattattataaataatgttgtagtaaatgtagaagattttgaaaatattatataattatatggtttgtttgggggtagatttttaggagtgggatattggatcgaaagggtttatgtttttttttttttgagatagagttttattttgtcgtttaattatagtttatttttgtttttattttttgggtttaagggatttttttattttagttttataagtagttgtgagtataggtgtatatttttttattttttgaaagggggaataattttaatagataatagaatgttttttaaaagattaacgatagtaggtgttagtatatttatgttttgttatttttatttattttgagattttttattattattttaatttgtattttttttataggtagtgtttaaatattggtaaataaattagttagttttagtcgtataaatttagtatagtttaaggtggtattgttataatagaatttttgagattgggtaatttatttatttgagatagggttttgttttgttgtttaggttggattgtagtggcgtgattatagtttattgtagttttgattttttgggtttaagtaatttttttgttttagttttttgtgtagttgggattatagatatggattattatgattagtattttttttttattttttatttttttagtagatgttgtttaggttggttataaatttttgagtttaagagatttttttattttagatttttaaagtgttgggattataggtattagttattatatttagtttgggtaatttataaagaatagagatttttggttgggcgcggtggtttacgtttataattttagtagtttgggaggttaaggtgggtggattatttgaggtaaggagttcgagattagtttggttaatatggtgaaattttgtttttattaaaaatataaaaaattagttaggtatagtggcggtatttgtaattttaattatttgggaggttgaggtaggagatttatgttggttaggttggtttcgaatttttgattttaggtgatttatttatttcggttttttaaagtgttggagttatcgcgtttggatggagattaagtttttaatatatgagttttgggggatatatttaaatttgtttatttaaagtaattaaaagggttagaatttaattttaatagtttatttaagtataaaatatgagggtggattatttggaaatatcgattttaaatgaatggagttagtttcgaagtagagaagttaaggttttatttatatatataaaggtagaggagttttaggattatattttttatatatggttagtgcgtatttatagtaatttggttataggtcgagtgtagtggtttatttttgtaattttagtattttgggaggtcgaggcgggtagattatttgaggttaggagtttaagattagtttggttaatatggtgaaattttatttttataaaaatgtaataattagttgggtatgatggtaggtggttgtaatttcggttatttaggaggttgaggtgggagaatcgtttgaatttgggaggtagagggtgtagtgagtcgagattgtgttattgtattttagtttgggcgatagagttagattttgttttaaattgaaataataataataaataatttggttgtaagtagtgtttttttttgggaggtatatatttaatattttttatagagggtgtaatagttatgggtttgttgttatttggtttaagtaaagtaggataataaaagggaagttatttataagaagggttattaagaaggtagtaggtttttgttttatgtttaattttttttaataattgtatagaataagaaaaataagtaggtttaatttattattttagaaaaaattataattatatatggttgagattatagttatttttttttttaggttttaagtgttgtgggggttttaatattttttttatttattttaaaaaattatagtagaggggttgtgtatttttttatattttttggttatttggatttgtttttttgagatatgtttatttttattttttgtttattttttattgtttttgttttttttttaattagtttttaagatgtatttgtatattataggtattggttttttattatgtatggtaaatattttttttttatttattattgttttttgatttttattagtgttaattttcggggtaattaagtatatttttttatagtttgaggtttttgtttttgtagttttttaatttttagaatatttttatagttttttaaattatattttaaatgttttgttgtttaaatttaagattttacgttatttattaacgaaattatttttttttgattgaaataaaatattatatttgtggtattttcggattttgttgtattaatgtgttttttttattaataatattatattgttttattattgtggttttttgtttttgagacggagttttatgttgttgtttaggttggagtatagtggtgcgattttagtttattatattttcgttttttgggtttaagtaatttttttgttttagttttttgagaagttgggattataggcgtttgttattacgttcggttaatttttgtatttttagtagagacgggggttttatcgtgttggttaggttggtttcgaatttttgattttaggtgattttttcgttttggttttttagtgttttggtattggtttattgtgttttatatattatgtttgttatttggaaaggtaagtttttgtttcgttttgtaaagtttttttagtattgtagtagttatttttatttttatttttgatagtttcgttttgttatttaggttgaagtgtagtggttttatttcggtttattgtaattttcgtttttcgggtttaagcgatttttttgttttatttttttgggaagttgggattgtaggagtgtattattatatttaattaatttttgtatttttcgtagagacggggtttcgttatgttggttaggttggtttcgattttttgattttgtgattcgttcgtttcggtttgttaaagtgttgggattataggcgtgagttatcgcgttcggtcgtagttattgttttatacgattttaagattatttaattaaattttttgaatttcgtggagattttaatagaagtgtgtatttgtaatttttgaattgataattttttgttattttttatttaatatgttgttgtattagtttaaatattgttttaaatttttcgataagtcgtttttattcgtagttttttgggttattttttttttttttttttttttttttttaaaaaaataggaagtttttttatttgtagcgttaattgagtcggtttttcggcgcgcgttagttttttttttgttttcgttttaaggttttgcgttattatgggaataaaggttgacgttatttagggtttttttgttggatttaagggtcgatggtgaagggagacgggtggagaggcggttttgttttatttacgtatgcgtattttttgttttaggattttttcgtcgtaaatttcgtttcggttgggtttttttcgtcgcgattttcgtttaatttcggagaaattgttttttgggggaggggagtagaaaaaggttgaaattagcgatagttaatttcgcgatattataacgtaggcgagattgattgagtttattatcgtagttaatgagagagttcgtcgtcgtttcgttatagagttcgttttattttatttttttttttttggattcggagtttagtttacgtagtaataaatgaagtgcgcgttgcgatattttttagtttatcgaatttcgtcgttattttttcgtttggtttaacggttcggttaattttagcgcgtattaagaaggattgaggtttcgttaatcggaggtcgtcgatttcgatttttcgtttcggttcggtttaatttaggtttcggtttcgtcgttttcggttcgttttcgcggtgtttttttttttttttttttgtgcgtttcgcgtcgtcgtcgttcgtcgcgtgagaggacgggtttcgcgcgtttcggtagcgtattcgggtttttttttttcgggaggtttgcgaaggagaagtcgtcgtagaggaaaagtaggtgtcggtgtttgttttcgggggcgttatggcgatcggagcgaacgttacgtcgttgggtaagttgggttttttcgggttgttttcgtttttcgggtttaaaggaggtttcgagtcgggtttttcgtttgtattcgggtttggggcggggttgttggttttcgggtcgtcgtcgttttcgttcgtgggttcgatgggggttttgatcgcggttttttttttcgcggcgttgttttcgtcgttttcgtcgtcgtttttttcgtttttttagtagtcgtcgtcgtttttatcgttatcgtttttcggcgtttcgtattcgtcgtcgtagtcgtttttttcgtcgtcgttttattagcgcgtgtcgtcgtcgtagtcgtcgttattttagtcgtcgcgtaaggattagtagtcgggttcggtcggcggcggaggaggtgagtcgggtcgagagagcgcgagaggcgtcgcgcggacgggttcggtcgtttgaggggcgcgcggcggcggcgacggcggttgtacgcggtaggggcgcgcgtgcgcgtacggggaggttcgggcggaggcgtttttgggcgcgcgcggtttggttttagggtttcgagtgcgtacgcgcgttgtggggggagggttgggcgggcgggaggcgttttgtgcgtagacgtagtgaggtggtcgggttgtgcggcgtaattgtatagattgggggtttattattgttgtttagttcgttggtgtcgggaataggggtggcgggtgtttagcgttggacggggtgttagttgtgaatgttagtagggcgtgaaagttttatttgatgacgtgtagcgatttttttttggttttgaggaattagaatgggaatcgtattaaggatagtttttttgtttttatagtaaggtagggtttttattcgggagaggttggtatgttttagatgatggttgggtttgattttttttggttttttttggggagagaattttagtttgtttttttttttaaatttgtttagtatgtttagattttagtttgatcggttgttttgtcgttttgttttaaaaagtttttttttttgattttgtattttttgggaaatagaaggatttttttgtggtaaatgtagggagtttttgtttatgtacggggaaaggagaatttggttgttattgtataggttgttgaatttttgatagatttttttaagagtttagatttttagtgtttaattggttaggaaaattgaatgttgattttggttaaatttatgaagataaaggtgattttgttgaagaattgggttttttttatttggtagggtgtaattaggtttagttgtggttcggtttttcgtataaaagtgattggtgaggggagtggaggtgggtggagtttttagttttattaggattgttttataaatttatgattttttagtgtatttttgttttttttggggattttagagtatttatggttgatgtagtatttatttaatattttttgtagttatatgtattaagattattacgtttatatatttgatagtttttttagataaaagaaggtgaaatgttaatttgtttgattaaggattatatatttttgtagtggttataagttttaaatttttgatttttgaggtttgttttttgtttttttaatgtttaagttttaggttaagtttttagttttatagtttgttgagtttttgtgtagtattttaaatatttttagttgtttgttgataattatttgtatttatatcggatggattttgtttttgttttttaga

SEQ ID NO: 330 - DNA, 7138 bp, Artificial Sequence
  chemically treated genomic DNA (Homo sapiens)
tttaaaaggtagagataaaatttattcgatgtaaatataagtagttattaatagatagttaagggtatttaaggtattatatagaaatttagtagattgtgaagttgagagtttaatttaaaatttaaatattaaaaaaatagaaaataaattttagagattagagatttaaagtttatggttattataagggtatgtggtttttggttaggtaagttaatattttatttttttttgtttagaaaaattgttagatatataaacgtggtaattttaatgtatatggttgtagagagtgttagatagatattatattaattatgagtgttttgaaatttttaggggagataaaaatatattgaagaattatagatttgtaaagtagttttgatgggattgggggttttatttatttttattttttttattagttatttttgtacgagaggtcggattataattaaatttagttatattttattaagtgggaaaagtttaattttttaataagattatttttgtttttataagtttagttaagattagtatttagtttttttggttagttggatattgagggtttgaatttttaaaaggatttattaaaaatttaataatttatataatagtagttaagttttttttttttcgtatataggtagaaattttttatatttgttataaaagagtttttttattttttaaggggtataggattagagggaaaagttttttaaaataaagcgatagggtagtcgattagattgagatttaaatatattgaatagatttaaaaaaaaaaataaattaaaattttttttttaaaagagattaagaaagattagatttaattattatttgaagtatgttaatttttttcggatgaaaattttgttttgttgtagaagtagaggagttatttttggtacggtttttattttggttttttaagattagaagggagtcgttgtacgttattaggtgaggtttttacgttttgttggtatttatagttagtatttcgtttagcgttgaatattcgttatttttgttttcgatattagcggattggatagtaatagtgggtttttagtttatatagttgcgtcgtatagttcggttattttattgcgtttgcgtatagagcgtttttcgttcgtttagttttttttttatagcgcgcgtgcgtattcgaggttttagaattaggtcgcgcgcgtttaggggcgttttcgttcgggttttttcgtgcgcgtacgcgcgtttttgtcgcgtgtagtcgtcgtcgtcgtcgtcgcgcgttttttaggcggtcgggttcgttcgcgcgacgtttttcgcgttttttcggttcgatttatttttttcgtcgtcggtcgggttcggttgttggtttttacgcggcggttggggtggcggcggttgcggcggcgatacgcgttggtagagcggcggcggagggggcggttgcggcggcgggtacgaggcgtcgggggacggtggcggtggaggcggcggcggttgttggggaggcggagggggcggcggcggaggcggcggaggtagcgtcgcgaaggggaaggtcgcggttagggtttttatcgagtttacgggcgggggcggcggcggttcgggagttagtagtttcgttttaggttcgggtgtaggcggagggttcggttcgaagttttttttgggttcggggagcgggggtagttcgggggggtttagtttatttaacggcgtggcgttcgtttcggtcgttatggcgttttcggggataggtatcggtatttgttttttttttgcggcggtttttttttcgtaagtttttcggggggaggggattcgaatgcgttgtcggagcgcgcggagttcgtttttttacgcggcgggcggcggcggcgcgagacgtataaagagggaggagagagggtatcgcgggggcgggtcgggggcggcggggtcggggtttggattgggtcgggtcgaggcgaagggtcgaaatcggcggttttcgattggcggagttttagttttttttgatgcgcgttgggattggtcgaatcgttaggttaagcgaggaaatggcggcggagttcggtgggttgggaggtgtcgtagcgcgtattttatttgttattgcgtgaattgagtttcgagtttagaaaggaggggatggggtggggcgaattttatgacggagcgacggcgagtttttttattggttgcggtggtggatttaattaatttcgtttgcgttgtagtgtcgcgggattggttgtcgttggttttagtttttttttattttttttttttagggggtagttttttcgggattaagcgagagtcgcggcggaaaaggtttagtcggaacgagatttacggcgggggagttttggagtaggaagtgcgtatgcgtagatggagtaaaatcgtttttttattcgtttttttttattatcgatttttgggtttagtaaggaagttttaagtgacgttaatttttgtttttatggtaacgtagaattttggggcgggagtaggggaggggttggcgcgcgtcggaaaatcggtttagttgacgttgtaggtaaaaagattttttgtttttttggaaaaaaaaaaaaaaaaaaaaaaaaagtgatttaaaaagttacgaatagagacgatttatcgaaggatttaaaatagtatttgaattgatgtaataatatattagatgaaaggtaatagaaggttgttagtttaaaaattataaatatatatttttattggaatttttacggagtttagaggatttaattaaatgattttaaaatcgtataaaataataattacggtcgggcgcggtggtttacgtttgtaattttagtattttgataggtcgaggcgggcgaattataaggttagaaggtcgagattagtttgattaatatggcgaaatttcgtttttacgaaaaatataaaaattagttgggtgtagtggtgtatttttgtaattttagttttttaggaggatgaggtaagagaatcgtttgaattcgggaggcggaggttgtagtgagtcgagatggggttattgtattttagtttgggtgatagagcgagattgttaaaaataaaaataaaaataattattatagtattgggaaaattttataagacggagtaggagtttgtttttttagatgataaatatagtatataaaatataataggttagtgttaaggtattgggaggttaaggcggggggattatttgaggttaggagttcgagattaatttgattaatacggtgaaattttcgtttttattaaaagtataaaaattagtcgagcgtggtggtagacgtttataattttagttttttaggaggttgaggtaggagaattgtttgaatttaggaggcggaggtgtagtgagttgagatcgtattattgtattttagtttgggtaatagtatgagatttcgttttaaaaataaaaaattataataataaaataatatgatattgttggtaggaaagatatattagtgtaatagaattcggaaatattataaatgtagtattttattttaattaggaaaagatgatttcgttgataaatggcgtagaattttaaatttaaataataaaatatttagaatataatttaggagattataagggtattttaggggttgagagattgtaaagataggaattttaaattgtaaaaagatatatttgattatttcgaaaattaatattgataaaagttaagagataatgatagatgaggaaaaaatatttgttatatatgataaagagttaatatttgtaatatataaatatattttaaaaattaattagaaaaaaggtaaaaataatagaaaatgagtaaaaaataggaatggatatgttttagaagaataaatttaaatagttaagaaatatgaaagggtgtataatttttttgttgtggttttttaaaataaatagaaaagatgttggaatttttataatatttgaaatttggagagagaggtgattgtgattttagttatgtatggttataattttttttgagataataaattagatttgtttgttttttttgttttgtataattattggagagaattaaatatgggataaaaatttgttgtttttttaatgattttttttatagataattttttttttgttgttttgttttatttagattagatgatagtaaatttatgattattatattttttgtaaaaaatgttaaatgtatgttttttaaaaagaaatattgtttataattaaattatttattattattattttaatttgagatagagtttggttttgtcgtttaggttggagtgtaatggtataatttcggtttattgtattttttgttttttagatttaagcgatttttttattttagttttttgagtagtcgggattatagttatttgttattatgtttagttaattgttatatttttgtaaagatggaattttattatgttggttaggttggttttgaatttttgattttaggtgatttgttcgtttcggttttttaaagtgttgggattataggagtggattattgtattcggtttataattaaattattgtaagtacgtattgattatatatgaagaatgtaattttaaaatttttttgtttttgtgtgtgtaaatgaaattttaatttttttatttcgaaattgattttatttatttggagtcggtgtttttaggtagtttatttttatgttttgtgtttgaataaattattgaaattagattttgatttttttgattattttaggtggataggtttgaatgtgttttttaaagtttatgtgttagaaatttaatttttatttaggcgcggtggttttaatattttgggaggtcgaggtgggtggattatttgaggttaggagttcgagattagtttggttaatatgaattttttgttttagttttttaagtagttgggattataggtgtcgttattatgtttggttaattttttgtatttttaatagagatagggttttattatgttggttaggttggtttcgaattttttattttaggtgatttatttattttggttttttaaattgttgggattataggcgtgagttatcgcgtttagttagaaatttttattttttataaattatttagattgggtgtggtggttaatgtttgtaattttagtattttgagagtttgaggtgggaggattttttgagtttagaagtttgtgattagtttgggtaatatttattaaaaaaataaaaaataaaaaaaaaatgttggttatggtggtttatgtttatagttttagttatataagaggttgaagtaggaggattatttgagtttaggagattaaggttgtaatgagttatgattacgttattgtaatttagtttgagtaatagagtaagattttgttttaaataaataaattatttagttttagggattttgttatagtagtattattttagattgtgttgagtttgtgcgattgagattagttaatttatttattagtatttagatattgtttataagggaaatataaattaaggtgataatgaggaattttaaaataaatgaaaatagtagaatataaatgtgttaatatttattatcgttaattttttagaaagtattttgttgtttattaaaattgtttttttttttaaaaaataaaaaaatatgtatttgtatttatagttatttgtgaagttgaggtgggaggattttttgagtttaggaggtagaggtagaagtgagttgtgattgggcgatagagtgagattttgttttaaaagaaagaaaatataaattttttcgatttaatattttatttttgggaatttgtttttaaataagttatgtgattatataatgtttttaaagttttttgtatttattgtagtattgtttgtagtggtaaaaatgggtaaatagagtgaatttttattaatatatgaacgattgaattggaaaatttataatttagaatattaggtagttttgaaaagttgttaatttatattaattaatttaaagtaattattgttttgtgttaataaagaaatatatatgatatggttttgtttttgtaatataaattttatatagatgtgtgtatgtttgtatatgattatttgagtataataaaggttatagaaggatatatagtatatgttttattgtagagtgaaatgggcggttggaagttgtttaatatattttaaatatttaatttttttttttttttttttttatgagatggagttttgttttgttatttagattagagtgtagtggtatgattttggtttattgtaattttttttttttgggtttaagcgattttcgtgatttagtttttagagtagttcggattataggtatgcgttattatgtttggttaatttttgtatttttagtagagacggggttttattatgttggttaggttggttttaaatttttgattttaagtgattcgttcgttttagttttttaaagtgttgggattataggcgtgagttattaaatttagtttaaaaatttaaagttaaaaaaaaaatgttttatacgtttaataaatgtattatatgattttatttttgtaatattatataattataggtattgagaaatgtattaagggttgggtgtagtggtttatatttgtaattttagtattttgggaaggtaaggtaggaggattgtttgaggttaggagttcgaaattagtttgggtaatatagggagaatgtttttatagaaataaaaataataataattagttgagcgtgatgtgtgtttgtagttttagttatttgggaggttgaggtaggaggattgtttgattttaaagagtttgaggttgtaataagttgtgattatattattgtattgaagtttgagtgatagagggagattttgttttaaaaaaaaaaaaaaaaaaaaaaaaaaaggttgggtgcggtggtttatatttgtaattttagtattttgggaggtcgaggtaggtagattatgaggttaggagattgagattattttggttaatacggtgaaattttatttttattaaaaatataaaaaaa

SEQ ID NO: 331 - DNA, 6306 bp, Artificial Sequence
  chemically treated genomic DNA (Homo sapiens)
attatttataggatattgggttgtttttatttttaggttagtgtgaatacgttattgtgtgaatatatatttttattttttttgagtttatattttgaaattgaattgtttgtttatatggtaattattttaagaaattgtcggtcgggtgcggtggtttacgtttgtaattttaatattttgggaggtcgaggtaggcggattataaggttaggagatcgagattattttggttaatacggtgaaatttcgtttttattaagaatataaaaaaaaattagtcgggcgtggtggtgggcgtttgtagttttagttattgacgaggttgaggtaggagaatggcgtgaattcgggaggcggagtttgtagtgagtcgagatttcgttattgtattttagtttgggcgatagagcgagatttcgttttaaaaaaaaaaaaaaaaaaaaaagaaattgttaaattgttttttaaagtagttggattattttaggttttttttaaagtagttggattattagtaatataggagggttttattttttttatatttttattaataatatttttatggtattttttattatagtaattttagtgtgtgtgaagtggtattttattatagttttgatttgtatttaagattttttaaataggaaattttttttttatttagttttatttttagatgattagatattaaattaatttattttttaaatagttgttttttttaattataaaaggaatatttgttatttgaaaatgtatggatttataaaatataaaaagtgataaattttttttaattttattttttagagataattaatattaattttttttttttttttttcggttaatatttttagaaagtaattgttaatttttgttattgtatatttttttagttaaaaaaaaaaaaaaaaaagtttaggttgggggcggtggtttatatttgtaattttaatattttgggaggtcgaggcgggtagattacgaggttaagagatcgagattattttggttaatatggtgaaattttcgtttttagtaaaaatataaaaattagttgggtgtggtggcgggcgtcggtagtttttgttatttaggaggttgaggtagaagaattgtttgaatttgggagatggaggttgtagtgagtcgagattacgttattgtattttagtttgggtaatagagtaagattttattttaaaaaaaaaaagtttaatattttatttttaaaacgatttattatatatattgttttataatttgtttttttatttaaagtatttttttttaatggttttgttggtttttattgtataaatatattatgatgtaatttttttttttttttttttggagatggagtttttttttgttattcgagttggagtgtagtggtagaattttggtttattgtaatttttaattttttggtttaagttatttttttgttttagttttttaagtagttgggattataggcgtgtatttttatatttagttaatttttgtatttttagtagaggcggggttttattatgttggttaggatagttttgattttttgattttatgattcgtttatttcggttttttaaagtgttgggattataggcgtgagtttttttttaaaatgagttgagaattgattattataaagtttatgaatagtttattttttaaaataggaagtgttatattgtttttttaaataattgtattaatttgtttttagaatattgaatattatttttgtaattattattttaaattttatttttttaattgtatgtgataatagttatttttttatgttaaaaggtatttatagagatatatattgtgtttatatttttaatttatggtattattttaaatttatttatgttatttattttacggattagattttaaaaataggattttattaaattgttttaaaaaatttttttcgtttttttttttttattaaattgttttaaaaaatttttatcgttttttttttttattaaattgttttaaaaaatttttatcgtttttttttttttttttttcgtttttataagatggagttttgttttgttatttaggttggagtgtagtggtatgattttagtttattgtaatttttgttttttaggtttaaatgatttttttgttttagttttttgagtagttgggattataggtatgtattattacgttcggttaattttgtattttttagtagagacgggttttattatgttaggttgttttcgaatttttgattttagatgatttgtttattttagtttttaaaagtgttgggatgagttattatgttcggtttattgttttatttttttttaaggttttattatttttagttattaaattgacgtgtttattaaatgaagtgatataataaaaaaaaagtgtaattttttttttttttttatttttattttttttttttgagtaattattttatttttattttacgtatttatttagagatagagttttattattttgtcgtttaggttggtgtgtttgttatttaggttggagtgtagtggtgcgattttggtttattgtaacgtttatttttattttttgggtttaagtaatttttgtgttttagtttttttttaagtagatgagattataggtattcgttattacgttcggttaatttttgtatttttagtatagatggggtttttttatgttggttaggttggttttgaatttttaatttttagtgattagtttatttttggttttttaaagtgttgggattataggtatgagttattgcgtttggttattttatgagtaattattttaataatttattgtgtattttttaatataaatatatataaggtgttttgtttgttttaaaaatataattatgtataatatatgtagttttgaaatttttttatgtaatattttatggttatttttttaggtgtatatatagttttaatttatttttttttatagttgggtaatttttagagtatgaatgtattaatttatttttttttttacgtatgaatatgtatgttatttttagtttttgttattataaagaattttataagaaatttgtagatattagatttatagatgagattgtgaaggttaaagggtatatatttgtatttttaattttaatatatattataagatgattttatatattatattattagcgaaaggagtgtttatttttttatttttattgtttgataggtgaaaaatgtggttttttttaaaagtgataattttgattagtagtgtggttaagtatttttttaaatgttaatgattaattagttttttttttttcgggaagagttttttattgtttttgttttttgttagttggtaggggtttattttgttttaggaatgtataattttttgtgtagttaatttttataattattttttagtttattttttgtttgttaatagagttaagaaaaagtttttaaaaaatataattatataggtttatattttattttaagatattttagttatttgttttgttttataatttaaattataatgttttgattaacggaggttttttagtaaattttgatttgaaaaggtagatattttttatttttttagaatgttttggtgttatatagtttttatattcgtttttttgtaatatattttaagttatcgttagttattagttaggtataattaattttaagaagaggtatttatttatatttttatttttgttaattttttggaggttggtattatatcgagaaataaggttatttttgtttataagttgttcgaattttgattagtgcgttattggggaacgaatcgagtgtggatataacgtataaatataaaattttgttcggttttcgtaggaagttgaaattgagaaaggaaatcgagatagtaggagaagggtaattaagatgtttttaaaaataagacggtcggtgcggatagtagtgtagaagttagtaagttggagtgggtaatgtcggtgttttatttttaatttatgggagttattagagcgggggcggagttttatggcggttatattttgttcgttttcgtagtttttttattggagaatcgtagtaaaaggcggaaatcgcggaggcgttttgatttttcggtcggagagatagtttgttttttttaagtttcggggtaggggggtggggagggtaggggggtggggagggtaggggggtggggagggtaggggggtgggggggtggggagggtagggggtgggggggtggggagagtaggggggtggggagagtaggggggtggggagagtagggggtgggggggtggggagagtaggggggtggggagagtagggggtggggagagtaggggggtggggagagtaggggggtggggagagtaggggggtgggggttggggggtggcgtcgtggggggtggcggggtggggggtggggggtggggagagtaggggggtggggggtggggagagtagggcggtgggggagtggcggggtaggggggtggcggggtggggggtggggggagcgcgggcgttgggtgggcggggggtggggcggtgggggggtttgtttcgttttaatcgtcgcgtttgacggtcgtttattggttgtttgtattcgaattatattttttagtaggttttggggttagattggtcgtagttggagaggtgttagttcgtcgtggatgattagagttaattatttgtttttcgttttttaggtagaattatagagaggttatagtcgttttggttttttttcggttttgagagtttttttggtttgttttaagttttaacgttttaagcgtagattgtcggtttcgaacggggagattaggtttttgtatcggaaataaggtatcggttgtgacgttatagtcgtagagcgttcgattttttagaaggtatcgagtttttgtcgttttttttaattggcggcggcgcgaacgaatagtcgtcggcgatttgtgagggtattcggaagggcgaggggagggttcgatcgttcgcgtttagtttttttatttttttcggagtttgagtttttgagtcgtttttagtaaacgtttaggggttgtagaggtttcgagaggtgaggggtttcgtgagggcgggaattaggttgaggtcgtttttggggagcggagcgtgttcgttgttgagggagtaaggtcgggtagggagtttggtgagcgttttaggtaggggcgtacgttgagttttacggtaaaggtgttttttgattagcggaagaggttttagagtgagtttggttcggcggtttttagtgggatgtcgtttgtcgtttttagtagagttttgacggcggagaggagtcggtaggcggtgtgtggatattttttcggttttgtatttgtttttcgggagagttattaatcgttttttcgtttaaagggtatcggagggagtttcggttcgaggggtatagtatggttagatttagtgattaatttgtttttaggtagatgttttcggtattgattttagattttttgttttttagtttattgttttttttttaagtttgatttaatttatttttggtgggttttatatatcgtttttttttttgttttttttttttttttttttttatttttttttttttttttgatttttttttttttttttttttttttttttttttttttttttttagagttagggttttgttttgtcgtttagattgtagtgtagtggcgcgattatagtttattgtagtttcgattttttgggtataagtaatttttttagttttttagtagttgggattataggtttgtgtcgttacgtttagttaattttttttttttttatggagtcggtgttttgttgtgttgtttaggttggttttgaatttttggatttaagcgatttattcgttagggttttttaaagtgttgggattataggtgtgagttatcggtatttggttatattttgtattttttaggaggttggattttggtttttttcgttttatttttatttttttttttttggatttgaggtttgtatagtttttgttttttatttttaggattttttttttatatttttttaagtatattttgtttaaatattgcgttttagttatgatttttttattttagttgtcgttttttttagattttatgtagttttattagttatgttatatattggagtgtagtaatgtcgtgtttggttttttgggtaatttttggtttttttgtttatagt

SEQ ID NO: 332 - DNA, 6306 bp, Artificial Sequence
  chemically treated genomic DNA (Homo sapiens)
gttgtagatagagaaattagggattatttaaaagattaggtacggtattattgtattttaatatgtggtatggttggtgaggttatatgagatttaaagaaaacgatagttgggatagggaaattataattgaaacgtagtatttgaataagatatgtttaggaagatgtgaaaggaagattttgagaatgaaaaatagagattgtgtaaattttaagtttaaagggaagggagtaagggtggagcggagaaggttaaggtttagttttttgagaaatataaagtgtggttaggtatcggtggtttatatttgtaattttagtattttggaaggttttggcgggtggatcgtttgagtttaggagtttaagattagtttgggtaatatagtaagatatcgattttataaaaaaaaaaaaaattagttgggcgtggcgatataagtttgtggttttagttattggggagttgggaggattgtttgtgtttaggaggtcgaggttgtagtgaattgtgatcgcgttattgtattgtagtttgagcgataaagtaagattttgattttaaaaaaagaaaggaaaagagaaaggaaagaaggaggaagggaattagggaagagaaagaaaataaaaggaaaaagaaagaaaagatagaaagaaagacggtgtgtaaaatttattaggaataggttaaattaggtttggagaaagagtaatgggttagaagataggaaatttggggttaatatcgaggatatttgtttaaaagtaggttggttattgaatttggttatattgtatttttcgaatcgaagtttttttcggtgttttttgggcggggaggcggttggtgattttttcggggagtagatgtaaggtcgaggaggtgtttatatatcgtttgtcgattttttttcgtcgttaaagttttgttgagagcggtaggcgatattttattaaggatcgtcgggttaggtttattttggggtttttttcgttggttaaggaatatttttatcgtaaagtttagcgtgcgtttttgtttgaggcgtttattaggttttttattcggttttgtttttttagtaacggatacgtttcgttttttagaggcggttttagtttggttttcgtttttacggagttttttatttttcggggtttttgtagtttttgagcgtttgttggggacggtttagagatttaggtttcgggagagatagaaaaattaggcgcgagcggtcgagtttttttttcgttttttcgagtgtttttataggtcgtcggcgattattcgttcgcgtcgtcgttagttgaggagaacggtagggattcggtgttttttgggaagtcgggcgttttgcggttgtgacgttataatcggtgttttgttttcggtgtagaagtttggttttttcgttcggagtcggtagtttgcgtttgagacgttaagatttgagataggttagaggagtttttagggtcggagggaggttaggacggttgtagtttttttgtggttttgtttggaagacggaaggtaggtggttggttttagttatttacgacgggttggtatttttttagttgcggttagtttaattttagggtttgttgggaaatgtagttcgaatgtaaataattaatggacgatcgttaggcgcggcggttggggcggggtaggtttttttatcgttttatttttcgtttatttagcgttcgcgttttttttattttttatttcgttatttttttatttcgttatttttttatcgttttattttttttattttttatttttttattttttttattttttattttttatttcgttattttttacggcgttattttttaatttttatttttttattttttttatttttttattttttttatttttttattttttttattttttattttttttatttttttattttttttatttttttattttttattttttttatttttttattttttttatttttttattttttttatttttttattttttattttttttatttttttatttttttattttttttatttttttattttttttatttttttattttttttatttttttatttcgaggtttaaaggaagtaagttattttttcgatcggaaaattaagacgttttcgcggttttcgttttttattgcggttttttagtaaaaagattgcggaggcggatagggtgtggtcgttatgggatttcgttttcgttttggtgatttttataggttagagatggggtatcgatattgtttattttagtttgttaatttttatattgttgttcgtatcggtcgttttgtttttaaagatattttaattgttttttttttattgtttcggtttttttttttaattttagttttttacggaggtcgaatagagttttgtgtttgtgcgttgtatttatattcggttcgttttttagtgacgtattgattagggttcggataatttgtgggtagggatggttttatttttcgatgtaatattagtttttagaaagttgataaaagtaaaaatataaatgaatgtttttttttaaagttaattatatttgattaatggttgacgatggtttaaaatatgttataaagaaacgagtatgaaaattgtgtggtattaagatattttagaaaaataaggaatatttgtttttttagattaaaatttattaaaaagttttcgttaattaaagtattatggtttgaattatgaggtaaaatagataattgagatgttttgaagtaaaatataaatttgtgtgattgtattttttaagaatttttttttgattttgttaataaataagaaatagattggaagataattgtaaagattagttatataaaagattatatatttttaagataaaatgaatttttgttaattgataaaaagtaaaggtaatgaggagtttttttcgagaggaggaaaattaattggttattaatatttaaaaagatgtttaattatattattagttaagattattatttttaaagggaattatattttttatttattaaataatgaaggtggagaaataggtatttttttcgttggtagtgtggtgtgtgaagttattttgtaatatatattaaaattaaaagtataagtatgtattttttgatttttataattttatttgtgaatttgatgtttataaattttttgtagaattttttgtagtgataaaaattagaaatgatatgtatgtttatacgtaaggaaaggagtaaattggtgtatttatattttggaaattatttagttatgaaaaagaatggattggaattatatgtatatttggagggatggttataaaatattatatgaaaaagttttagagttatatatattatgtataattatatttttggaataaataaaatattttgtgtatgtttgtgttgagggatatataatagattattaaaatggttatttatgggatggttaggcgtagtggtttatgtttgtaattttagtattttgggaagttagaggtgggttgattattggaggttaggagtttaagattagtttggttaatatggggaaattttatttgtattaaaaatataaaaattagtcgggcgtggtggcgggtgtttgtaattttatttatttgggaggaggttgaagtataagaattgtttgaatttaggaggtggaggtggacgttatagtgagttaagatcgtattattgtattttagtttgagtgataggtatattagtttgggcgatagagtagtaagattttgtttttaaataaatacgtaaaataaaaataaaatggttatttagagggagggaatggaaatggagaaaagggagagattatattttttttttattgtgttattttatttaatgagtacgttaatttggtaattaaaaataataaaattttaaaaaaaaatagaataataggtcgggtatggtggtttattttagtatttttggaggttgaggtgggtagattatttgaggttaggagttcgagagtagtttaatatagtgaaattcgtttttattaaaaaatataaaattagtcgggcgtggtgatgtatgtttataattttagttatttaggaggttgagataggagaattatttgaatttgggaggtagaggttgtagtgagttgagattatgttattgtattttagtttgggtgatagagtaagattttattttgtgggggcggaaaaaaaagaaaaaagaacgataaagattttttaaaataatttgatggaaaaaaagaacgataaagattttttaaaataatttgatggaaaaaaaagaacgaaaaagattttttaaaataatttgatggaattttgtttttagaatttaattcgtaaaataaatgatataaatggatttgaaatgatattataaattaagggtgtaaatataatatgtatttttataaatgttttttaatatgaaaagatggttattgttatatataattaaagaaatgaaatttaaaataataattataaaaataatatttagtattttaaaagtaaattaatataattatttaagagggtaatatgatattttttattttaagaagtaaattgtttataaattttgtaatggttaatttttaatttattttaaagaaaaatttacgtttgtaattttagtattttgggaggtcgaggtgggcggattatgaggttagaagattaagattattttggttaatatggtgaaatttcgtttttattaaaaatataaaaattagttgggtgtagaggtatacgtttgtaattttagttatttgggaggttgaggtaggagaatagtttgaattagggagttggaggttgtagtgagttaagattttgttattgtattttagttcgggtgatagaaggagattttatttttaaaaaaaaaaaaaaaaaggttatattatgatatgtttatatagtggaagttaatagaattattgaaaagagatattttaagtgaaaaggtaagttataaagtagtatgtataataagtcgttttaaaaataaaatgttaggttttttttttttgagatggagttttgttttgttgtttaggttggagtgtagtggcgtggtttcggtttattgtaatttttattttttaggtttaagtaatttttttgttttagttttttgagtagtagggattatcggcgttcgttattatatttagttaatttttgtatttttattagagacgggggttttattatgttggttaggatggtttcgattttttgatttcgtgatttgttcgtttcggttttttaaagtgttgggattataggtgtgagttatcgtttttagtttaggtttttttttttttttttttaattggaggaatatataataataagagttaatagttgttttttagaaatgttggtcgggggggagggaaagagagttaatattggttgtttttaaggagtaggattagaaggaatttgttattttttatgttttataaatttatatatttttaaataataagtgttttttttgtagttgaaaaaaataattatttgaaaggtgagttaatttagtatttgattatttaggagtaaaattaagtgaagaaagaattttttatttaaaagattttgaatgtaaattaaaattataatgagatattattttatatatattagaattattataataaaaaatattataaaaatgttattggtgaggatgtggagaaaatgaaatttttttatattgttggtggtttagttattttggaaaggatttaaaatggtttagttattttggaaaatagtttggtagttttttttttttttttttttttttttgagacggagtttcgttttgtcgtttaggttggagtgtagtggcgggatttcggtttattgtaagtttcgtttttcgggtttacgttatttttttgttttagtttcgttagtagttggaattataggcgtttattattacgttcggttaatttttttttgtatttttagtagaaacggggttttatcgtgttagttaggatggtttcgattttttgattttgtgattcgtttgtttcggttttttaaagtgttgggattataggcgtgagttatcgtattcggtcggtagttttttaaaatagttattatgtgaataagtagtttaattttaaggtataaatttaagagaaatggaaatgtgtgtttatataataacgtgtttatattagtttaaaagtggaaataatttaatgttttgtaagtgat

SEQ ID NO: 333 - DNA, 2067 bp, Artificial Sequence
  chemically treated genomic DNA (Homo sapiens)
ggtgaggtggtagttatttggagtattagttatgttggaggttgaggcgggaggattttttgagtttaggggtttgagattattttgggtaatatagtgagatttcgtttatataaaataaataggaaaaaaaaaataagatattggtttttttaattttttaagtgttaaaaaaaaaaaaagaaaaagaataataaattttatttggaaaggggatatggtattgttaaaatgtagatttttgggtatttagagattttaaattggtagggttagggtgggtttaaaattagtaagtgattacgtggttttgaagttagtggtttaaggattatttttgtagaatcgtggtttttttgttatagtttaggtagtttttggtttagtttttgttttttttataattttttttagcgtttgttttgggttagattagtgttgggaggagtcgttattgagtttttagattggtaggggaggtagatggagaaaaggagtgtgtgtggttagtattggagtagaggtagtagtgggtaatagaggaagtgagtaaatttttgggagggttttttagaagtgatgtgttttttttttttgttttagagataggatttcgttttgtcgtttaggttggtgtgtagtggtatgattatagtttattgtagtttcgatttttcgggtttaagtaatttttttattttagttttttaagtagttgggattacgggtatacgttattatgtttggttaatttttgtattttttgtagagatgggtttttattatgttgattaggttggtttcgaatttttgggtttatgcgatttatttcgttagttgattatagggatttcggtggtgagttatcgcgtttagacgttattttatcgtattgtaaacgtttgttatttttttgtttttttgtttattggattgtgagttttttagggttacgaattgaggatggggtatagagtaagttttttaaacgtttgttgaatgagtgagggaatgaatgagtttaagtagatgttatacgttggttgttggagattttggttaaaatgggatttgtaggaaagttcgacgtttttttcgttatttttaggtatcgttttttagtttgggttttgggtgagcgggatagggttgggtgtaggattaggataatgttatgggtgaggtaagttgaggatggaagaggtggttgatggttgggttgtggaattgatgattttgaaaagaagaggggatagtttttggaaatttaagttgaggttgttgggggttataggttgagggttacgtgtagaagagaggttttgttttgaatttgtattatagaaaggttagtgggatgcgggagcgtcggggcggggcggggtttatgttttcgtgtttttacgtttttagtaggggacgttcgggttgggggcggggagttagatcgcgtttggtattattcggataaagtttgcgcgcgtttcgtttcgttattggtcgtatcgtttcgcgtcgtcgttttatttcgtttttcgtcgtcgggttcggcgcgttaaagttaataggaatcgtcgtcgttgttttcgttacggtcggggtagttaattgtggcggcgttcggcggttcgtggttttttcgcggtaaaaaggatttggcgcgtaaaagtggtcgggattttgtaggtagcggcggtcgggggcggagcgggatcgagttttcgtcgaggtttgtcgttatgggttcgcgtcgtcgtcgtcgtttgttattcgggtcgcgcgggtcgtgagcgttatggttttggtcggggtttttgcgggcggtttatgcgcgtcggcgttggaggttttgttcggggtcggcgcgttgcggttgttcgatttttcgtagatcgttattattttcgtcgcgtaggacgttagcgtttcgtcggtttttatcggtttcgcggcgttcgtcgtcggtttttgcgattttgatttgttgtttttcgttatatcgtaggcgtttcggtttatatttagtgcgtcgcggttcgcgttcggtcgttcgtcggtacggatttt

SEQ ID NO: 334 - DNA, 2067 bp, Artificial Sequence
  chemically treated genomic DNA (Homo sapiens)
ggggttcgtatcggcgggcggtcgagcgcgggtcgcggcgtattgggtgtgggtcggggcgtttgcggtgtggcgaagagtagtaggttagggtcgtaggggtcggcggcgggcgtcgcggggtcggtgggagtcggcggggcgttggcgttttgcgcggcggagatgatgacgatttgcgaggagtcgagtagtcgtagcgcgtcggtttcgagtagggtttttagcgtcggcgcgtatgggtcgttcgtaggggtttcggttaaggttatgacgtttacggttcgcgcggttcgggtgataggcggcggcggcggcgcgggtttatggcggtaggtttcggcgagggttcgatttcgtttcgttttcggtcgtcgttgtttgtaaagtttcggttatttttacgcgttaaattttttttgtcgcgaaagagttacgagtcgtcgagcgtcgttataattggttgtttcggtcgtgacgggaataacggcggcggtttttattggttttaacgcgtcggattcggcggcgaggggcgagatggggcggcggcgcggggcggtacggttaatggcggggcggggcgcgcgtaggttttgttcggatggtattaggcgcggtttgatttttcgtttttagttcgggcgttttttgttggaggcgtggggatacgggaatataggtttcgtttcgtttcgacgttttcgtattttattgatttttttatagtgtaggtttagaatagagttttttttttgtacgtgatttttaatttgtagtttttaatagttttagtttagatttttagagattgtttttttttttttttaggattattagttttatagtttagttattagttattttttttatttttaatttgttttatttatgatattattttaattttgtatttagttttatttcgtttatttagagtttaagttgaagagcggtgtttggaaatggcgagggggacgtcgggtttttttgtaagttttattttagttaaaatttttaatagttaacgtatagtatttgtttgaatttatttatttttttatttatttaataaacgtttggagagtttgttttgtgttttatttttaattcgtggttttaaggagtttatagtttagtagataggggaatagaaaggtaatagacgtttataatacgatgaagtggcgtttgggcgcggtggtttattatcggaatttttgtaattagttggcggggtggatcgtatgagtttaggagttcgagattagtttgattaatatggtgaagatttatttttataaaaaatataaaaattagttaggtatggtggcgtgtgttcgtagttttagttatttgggaggttgaggtgggaggattgtttgagttcgagaagtcgaggttgtagtgagttatgattatgttattgtatattagtttgggcgatagagcgagattttgtttttaaaataaaaaaagaaaatatattatttttagggagtttttttaaggatttatttattttttttattgtttattgttgtttttgttttaatgttgattatatatattttttttttttatttgttttttttgttaatttaggagtttagtagcgattttttttaatattggtttggtttagagtaggcgttgagaaaggttatgaaagaaatagaggttaagttagaggttgtttagattgtgataaggagattacggttttgtaagggtggtttttaggttattggttttagaattacgtggttatttgttaattttgggtttattttggttttgttaatttaaaatttttaggtgtttaagaatttgtattttaataatgttatgttttttttttaggtgaaatttgttattttttttttttttttttttttgatatttagggaattagaaaagttagtattttatttttttttttttatttattttatatagacgaggttttattatgttgtttagggtagttttaaatttttgggtttaagagattttttcgttttagtttttagtatagttggtattttaggtgattgttattttatt

SEQ ID NO: 335 - DNA, 1473 bp, Artificial Sequence
  chemically treated genomic DNA (Homo sapiens)
ggattttagagattggaagtgtgaattttaatgttttgttgttaaaggagcgattttggatatttttattattttatttaaagcggggtacgttgattaatacgtgaagttgtgtattaatggtttaaattaagttataggtatgaattttatataaaatagattaatattatatgttataatggaattttaaatatttcgtgtttatgtatttttaatttttacgtgttttaattgatgcgtaaggtaattgtattttttgaggtttatttttgtatttagatggggtaaaagaagttttttttacgtttttgtttttattttattattttttttattaaaaatttgtattcgattcggtatgtgtttttttttttttttttttttatttttgttaagttttagtattttttaaaaagaaaacggaaaggttatatattttattttattattatggtttcggtaaatgtgaaaaggcgaataatgaaacggaggagggaaatatagaatagaatgaacgtgtttttttgaatagcgcgttttttttaaggtattggaatttttcggatggagtgatgggtggcggagggtttttgggcgtcgtgttattaaggaatggtagggtattcgcgagtagggtttaggcgtttttttagtagtttagtcgggataaggggggcggtggagagtgaatttcggtcgtatattttcgtagtttttcgtaggaatttcgtttttttttttttttttttttgggtatatattagtttggttcgattttttatttagttttttttttttagaatttcgatttatagcgttgacggaatggagtgttttttttattggttcgagcgttatttttcgaggtggtattgtcgtttgattggttggttattttagattttttcgtttatttttttattcgggtagtcgatttttcgttttttagtatcgttcgtagttttcgttttcgttttttttttcgttttcgttcgtttagcggtttcgttcggttcgttgcgattcggttcgcgcgttggttcgtttcggggcgtacggttttataaatatacgtgcgcggcgggtcgggcgagagcgtagtggaggaggcgcggttgtgagtagtatcgggagtggggtgatttcgggttaggggagcgcggcggtcgtatcgggtttagtcggagtttcgaaggagtgattaggatattcgggtgggttatttttttttcggtgtttttgttttttttttttttgggttcgggttgagtgtcgtttattgagtaaagattttttcgtaaaatttagagcgattttttcgttaattgttgggttcgggagtgtcgcggtgtttcgagcgcgtcgggttaggtaaagggagcggatcggtcgcggacggggttcggagtttgtttgtttttttcgttcgttttagcgggttcgttcgcgtagggcgagggcggcgcgatg

SEQ ID NO: 336 - DNA, 1473 bp, Artificial Sequence
  chemically treated genomic DNA (Homo sapiens)
tatcgcgtcgttttcgttttgcgcgagcgaattcgttggggcgagcgagggaggtaggtaagtttcgggtttcgttcgcggtcggttcgttttttttgtttggttcggcgcgttcggggtatcgcgatattttcgagtttaataattgacgggagggtcgttttgggttttacgagggaatttttgtttagtgggcgatatttagttcgagtttaaaggaaaaaaaagtaaaagtatcggaagaaaagtagtttattcgggtgttttagttattttttcggagtttcgattaagttcgatgcggtcgtcgcgtttttttagttcgggattattttattttcggtattatttataatcgcgttttttttattacgttttcgttcggttcgtcgcgtacgtgtatttatagagtcgtgcgtttcggggcggattagcgcgcgggtcgggtcgtagcgagtcgagcggagtcgttgggcgggcgggggcggagggagaggcgagggcgggggttgcgggcggtgttggggggcggggagtcggttattcgagtggaggagtgggcgggggggtttggagtggttagttaattaggcggtagtgttatttcggggaatgacgttcgggttaatgggaagggtattttatttcgttaacgttgtgggtcggggttttgagaaaagagagttgagtggggagtcgggttaggttgatgtgtgtttaagggaggggaaaagagagagcgaagtttttgcgaagaattgcgggaatgtgcggtcggaatttattttttatcgttttttttatttcgattaggttgttgagggagcgtttgggttttgttcgcggatattttgttattttttaatagtacggcgtttagggatttttcgttatttattattttattcgagggattttagtgttttaagaaagacgcgttgtttaagaaggtacgtttattttgttttatatttttttttttcgttttattattcgtttttttatatttgtcgaaattataatgatggaatggaatgtgtagttttttcgttttttttttaaaaaatgttaaagtttagtaaaagtagaaaaaaaaagaaggaaaagtatatgtcgaatcgaatgtaggtttttggtgaagggaataataaaataaaaataaaaacgtggggggggttttttttattttatttaaatgtaaaagtgggttttaagaaatgtagttgttttgcgtattaattagagtacgtaaagattaaaaatgtatggatacggaatatttaaaattttattatgatatataatattaatttgttttatgtaaaatttatatttgtaatttaatttaggttattaatgtatagttttacgtattagttagcgtatttcgttttaaataaggtgatgagaatgtttagagtcgtttttttgatagtaaagtattaaaatttatatttttagtttttgggattt

SEQ ID NO: 337 - DNA, 505 bp, Artificial Sequence
  chemically treated genomic DNA (Homo sapiens)
ttgtagaaggtggtagatattggtagttggtattagtgcggttttattgtgattattatttttgaacgttagattgttgaaggtttttttaatagattttttgtgtaattttttgtttttattaaatttagtttatagtaaggaagtgaaattaattttagaggtgtagggagggtttaagggagtgtggtaaaattagagggtgtttagaaatagaaatttgatcgtttggggttattttgtagggagagtttttttgatgattttttatttgtttttttgtatgttggtttagtttggcgggtttttaattggtgattggttagtgatgaggttagtgatgaggttgtgtgtttttgagttgggtattcgaaggtatttttggggaagttgagggtacgaggaggggttgttagatttcgggagttgttgtttggttgggatttttatataatgcgttgtttggttttacgttttgttgggttttatttgttagagttttaag

SEQ ID NO: 338 - DNA, 505 bp, Artificial Sequence
  chemically treated genomic DNA (Homo sapiens)
tttggggttttgataggtaggatttagtagggcgtggagttaggtaacgtattgtgtaggaattttagttaggtagtagttttcggagtttggtagttttttttcgtgtttttagtttttttaaggatgttttcggatgtttagtttagaagtatatagttttattattagttttattattaattagttattagttgggagttcgttaagttaagttaatatgtaaagaaataagtgagggattattaaaaaaattttttttgtaaggtggttttaagcggttagatttttgtttttgaatattttttaattttattatatttttttaagttttttttatatttttgaaattaattttatttttttattgtggattgaatttggtgaagatagaaagttgtatagaaagtttgttgggggaatttttaatagtttgacgtttagaaatgatgattataatggaatcgtattggtgttagttgttaatatttgttattttttgtag

SEQ ID NO: 339 - DNA, 10996 bp, Artificial Sequence
  chemically treated genomic DNA (Homo sapiens)
agtttgtttggtcgttttagggtttgttggaatttttttttcgtttatgtatttgtgaattattttacgtttgttattatcggttttttatagggtgatgtttattagtagtggtgataggttaatttttattattttttatgcggttgaatagttatttttgaattatttttttttttagtaattttttttttttcggattttttgtagttaatttgaaagaataataaggaggtggttggaaatttgttttaaggaatcgtttgtttttttttcgttggaaattttgtatttcggacgtttttgtttttgtttttatttgattttcgttttcgttgatatttaggcgcgatgatttttgttgttagtagagggtatatttattttattttcgtaaatttgaacgcgggtgttgtttagagagggggcggagggaaagacgttttgtagtaaaatttagtatagcgattggttgtttttcgcgtttgcggtaaaggtttggaggtaggagtaatttgtaatttttaaagttgaattgtgtagtgtatcggatttggaagttattatatttatttaatatttgaacgttgagttgtaaatttaacgggtaataatttattttgaatagcgtatatgttatatatatatttttttttttcgaattgtttttttttttggaggtggtggagggagagaaaagtttatttaaaatgtttttgggtgagggattaaggatgagaagaatgttttttgttttttatgtcgtggaataatataaaataaaaaatttcgagggaatatatattatatattaaatatagattattttagggagtaaataaattatgtgtggggttgggtaattagttgagtcgaagcgtaaataaaatgtgaatatacgtttgcgggttatatatagtgtatttttattagtatttagaaaaaattgtgagttagtgaattaggaaattaatgtttggaaggtagttaaattttaattagtttaagatttttttttttttttaaaaaaaggtacggaagtaatatttttttttttttttttgattagaatcgatgtattttttgtgtatgatcgtatttttaataataaaaggggaaagaggatttggaaaggaattaaacgttcggtttgttcggggaggaaagagttaacggttttttttataagggtttttgttgattttttcggttcggtttataagttttttatttgttttttttaggaagttcggtttcgcggttcgggtattttttgttttttttatattttttcgtttagtatttttgattttttttaaattcggtagttcgagattgttgtaaatcggcgttatagggcgtaaaggggatttgttttttttgaaatttggttgagaaattgggaatttcgtgtgggaggcgtgggggtgggacggtggggtatagattggtagagagtaggtaatttttttttcgttttagtttagttttggaataggtagatatattttagggttaaatagacgtttttcgtacggggttttacggaagtttgagtaggcggggtaggaggggcggtatttgttgttttggtagtaaattgggggatttagtttgggtggaaggtatttaatttagatagttgtgtatatataatgtataatatatgattttttttaataaatgtaatgggagtttatttataacgcgttttttaagtatacgtggtaatgcgttgttgggttattttaattattttaggtatcgtttttttttttatgtttttattatttttttttatttatattaatattttacgttttgaacgcgcgtttattaatattttttttttttttattttttttgggatttttgattaaagcgcggttttttttttagttttagcgaggcgttttgtagtttggtacgcgcgtggcgtggcggtgggcgcgtagtgcgttttttgtgtggagggtagttgtttcgtttgcgatgatttatatttataggataaggatgcggtttgttaaatagtattgttacggaggagtagtagagaaagggagagggtttgagagggagtaaaagaaaatggtaggcgcgcgtagttaatttatgcggtttttttattttgtttatattttagagttagagtgttcggttgttcggttgagttttttttttattttttttattttttttattttttttataagcgtttttttcgggtttttaaagtagagggcgtgggggaaaagaaaaaagattttttttcgttaattttcgtttatcggttttttataatgcgagggtttggacggttgaggattttcgagttgtgttgttcgcggtcgttatcgtcgggtttcggtcgtttttggttttttttttgtttcgagaagggtagggttttttagaggtttggcgggaaaaagaacggagggagggatcgcgttgagtataaaagtcggttttcggggttttatttaattcgttgtagtaattttagcgagaggtagagggagcgagcgggcggtcggttagggtggaagagtcgggcgagtagagttgcgttgcgggcgttttgggaagggagattcggagcgaatagggggtttcgtttttggtttagttttttcgttgattttttagttagcggttcgtaatttttgtcgtatttacgaaattttgtttatagtagcgggcgggtattttgtattggaatttataatattcgagtaaggacgcgattttttcgacgcggggaggttattttgtttatttggggatattttttcgtcgttgttaggattcgtttttttgaaaggttttttttgtagttgtttagacgttggatttttttcgggtagtggaaaattaggtaagtatcgaagtttatttgttttttaatttatttttttattattttaatgttgagatgagtcgaatgtttaaatagggtgtttttttttttatttttgcgttattgatattttttttagagtagttatggtaattggggttggggtggggggtaatttagaattggatcggggtaaagtgatttgttaagatgggagaggagaaggtagagggaaaacgggaatggtttttaagattattttttcgagatttttgttttatgaatatatttacgttgattttcggtcggtcggatatttttgttttattgtgttaattgttttttgggttttggggggttgggggttgttttgcggtgggtagaaagttttttgtattttgagttttttggagtagggatcgtatatcgtttgtgtgagttagatcgtttcgtagtcgttgatttgttttcgttttcgggagggtatttaaatttcggtttatcgtatttttgatagtcggagacggatattgcggcgcgtttcgttcgtttgttttcgcggcgattttaattcgttttgatttttttaagaagttggtatttggttttttaaaaagtaataatataatttaaaatttgggtttttagaggtgttaggacgtggtgttgggtaggcgtaggtaggggaaaagggaggcgaggatgtgttcgatttttttggaatcgttgatttggaaaaattagggcgaattttcgtatttagttttgatttttttgtcgcggtcgttttcgggtgttttcgcgttcgagatgcggaggaattgcgaggagcggggttttgggcggttttagaatagttgttatttttggtggggtggtttcgggggaggtatcgtagcggggtttttggcgtagttgtattttcgtattgagtgcgaagggaggtgtttttattattatttgatattttttttgtatttatggaggggtgttaaagttcgcggttgagttcgttattttagtcggcgagagaaagaagaaaagttggtaaaaggagtgttggacgggggcggtattgggggtggggacgggggcggtggagagggaaggttgggaggggttgcggtgtcggcgggggtaggagagcggttagggcgcgagtgggaatagtcgtagcggaggggtttcggcgcggagcggggtttacgtagtcgttagcgtttaggcgtttttcgtttttttttttaggtggcgtaaaattttgtgttttggattttggtaaattgttttttttatcgttatttttcgcggttttttaagggcgttagggtcgatttcgatttttttgtcgttgcggggtcgattttcgggttttgcgtttcgggttttcgggggagcgggggttcggcgggtattaagtcgttggtttattaagtgcgttttcgagatagtaggggattgtttaaagggggtgaaagggtgttttttttatttttttattaagattatttagtcgttttaggggatagttttgtaaggggagaggttcgggattgtggcgcgtattgcgcgttgcgttaggttttcgtattaagatttttttaatttaagattgtttttcgttttgtgtgtttcgttttagtagtttttcgcgacgatgttttttaacgttagttttattaataggaattatgatttcgattacgattcggtgtagtcgtatttttattgcgacgaggaggagaatttttattagtagtagtagtagagcgagttgtagttttcggcgtttagcgaggatatttggaagaaattcgagttgttgtttatttcgtttttgttttttagtcgtcgtttcgggttttgttcgtttttttacgttgcggttatattttttttttttcggggagataacgacggcggtggcgggagtttttttacggtcgattagttggagatggtgatcgagttgttgggaggagatatggtgaattagagttttatttgcgattcggacgacgagatttttattaaaaatattattatttaggattgtatgtggagcggtttttcggtcgtcgttaagttcgttttagagaagttggttttttattaggttgcgcgtaaagatagcggtagttcgaatttcgttcgcggttatagcgtttgttttatttttagtttgtatttgtaggatttgagcgtcgtcgttttagagtgtatcgatttttcggtggtttttttttatttttttaacgatagtagttcgtttaagttttgcgtttcgtaagattttagcgtttttttttcgttttcggattttttgtttttttcgacggagtttttttcgtagggtagtttcgagtttttggtgttttatgaggagatatcgtttattattagtagcgattttggtaagcgaagttcgtttaggtttgttaaaagtgggcggttggatattttttttatttttattggtagtttatttaacgggttatttttattaggaaggagagatagtagatttggagagatttgggagtttattatttttgaaattttgggttttagcgtttttttttattttttttttttagattgtttatgtttgtagttttttttttcgtttgttttttattttttaggaattttatttaggtttttaaattttttggtttattttataatttaatttatttttttttatttttcgttaatattttaattgttttggggcggggtggtagggagtgtatgaatgaggataagagaggattgatttttgagagtgaatgaattgttttttttttaattttcgagaagtggtgggatttaatgaattatttataaaaatgaggggttgtgtttagaggttaggtagggtttgtttgagtgcgggagttagtgaattgttttaagagtgggtgggttgaggagttgggatttttttagtttattttgaatattgaaaagtaaatttttgttaaagttggattttttttttttttttattttttttttcgtttttttggatttttggtaaaattgtaatttttttttttttattttttatttttagtaaaatagggagttgttaaagttatattaagtaatttgtagttattatttgtaatatttgaagtgtttttggtaaagttttttaaaaataggaggtgtttgggaatgtgttttgttttgggtgtgtttaaagttttattaagttttaggtaagaattggtattaatgttttattttgggaagttgtattttttttgtttatgttataatttagttgtttttttttttatgagatttttatttttatggtgagaggagtaagggtggttggttagattggttttttttttttttttttttttttttaagacggagttttattttgttattaggttggagtgtagtggcgtaattaatttttaattttttggtttaagagatttttttgttttagttttttaagtagttgggattataggtgtatattattatgttaggttaatttttgtaattttagtagagatggggttttatcgtgttggttaggatggttttttttgattttacgattcgtttatttcggttttttaaagtgttgggattataggtgtgagttagggtattaggtttagatgtggttttttggggagataattttgtttagagatttttttaacgtatttatgttttgtatttgtatagtattaatttggtaattgattattttaatgtaattttgttaaaggagtgatttttatttttttttttaaagaggaggaataagaagatgaggaagaaatcgatgttgtttttgtggaaaagaggtaggtttttggtaaaaggttagagtttggattattttttgttggaggttatagtaaatttttttatagtttattggtttttaagaggtgttacgtttttatatattagtataattacgtagcgtttttttttattcggaaggattattttgttgttaagagggttaagttggatagtgttagagttttgagatagattagtaataatcgaaaatgtattagttttaggttttcggatatcgaggagaatgttaagaggcgaatatataacgttttggagcgttagaggaggaacgagttaaaacggagtttttttgttttgcgtgattagatttcggagttggaaaataatgaaaaggtttttaaggtagttatttttaaaaaagttatagtatatattttgttcgtttaagtagaggagtaaaagtttatttttgaagaggatttgttgcggaaacgacgagaatagttgaaatataaatttgaatagttacggaatttttgtgcgtaaggaaaagtaaggaaaacgattttttttaatagaaatgttttgagtaattatttatgaatttgttttaaatgtatgattaaatgtaattttataattttggttgagttttgagattgaaagatttagttataatgtaaattgttttaaattggattttgggtataaaagaatttttttatgtttattattttttttttttttttaatagatttgtatttaagaattgtttttaaaaaattttaagatttatataatgtttttttgtaaatattgttattaaatgtaaataattttaataaaacgtttatagtagttatatagaattttaattttagtatatagtatttagtattataggtattataaattttaattttttttatttaagtatattttgttttttaaagttgatttttttttattgtttttagaaaaaataaaataattggtaaatatattattgagttaaattttaagttgtgaatgttttgtttcgtttttttttttttttaattattattatttttgtttgtttttattaattgtttttttagagggcggttttaagaaaggtaagagtttttttttgttgaaatgggtttgggggttttaaggtttttaagtttttggaggttttaagatgttttttggagattatgataatagttagagttgatagttagaaggaatggtagaaggtaggtgagaaggtgagaggtaggtaaaggagatataagaggttaaaggtagtagttaagtatataaagaggtataaggattggggagttgggaggaaggtgaggaagaaatttttgttattttagttaattagtgttagttttttgtttattttaaatttaggaattttgtttagttgatggggatacggtgggaattagtttttgttgtttttataattaggcgttagttttgtttatgggttatttcgtaaattttagaggatttttgggaggaatgttattattaattttattttataaataaggaaatagaagagtttaaagaggttatgtaatttatttgtagttacgtagataatataaagtagtaatttggatttattttgtttaaaatatttaatttttcgttattatgttttggtttatttgggtttaatgtgttgagattaagaaggtttaggatttaatggatagatttaagttataataatgttaagttttatttgtgttttaagtatttttaagtattttatttttaattttatattaattttatgaaggagatattgttgatttttttatattagaagtagagagggaagttgaggtatataaagatttatttatatgtttaagatttattgatagggaaaagtggaagcgagatttgaatttaggttgtttatttttaatttgtttaagttattttttagacgacggtaggaattagttggttgtttgtgagtataggagttatagtttagtgggttatgttttttaagttttaatatttaagtttggttaggtattagtttttttttttttgtgatttattttgtttttattttgttgtttattgtttaatttttttttttataatgagaaggttattattttgatttttattttagttatttgttgaattagatttatgacggtttttgggaagaagttagtttagattataaaataaaatatatttattttttgttatgggagttattattttagaaattataaattttttttgtttttatttttttttatatatttatgatatatgtttattttgagtttttgaaaaggtatttttgaatatgtgtattaattataagtttttgaaaatttatggtttaaattagaaatgatgttgattatataggtaaatgaaggatgttattgttgttttaattattttattgttttagttttaaagtaggtttttagttttttgtattttgggattttaatttattattatttataaattaataaataattattttttttgattttgatttttagaataatttatttaaaattttaatgttttttttttgattttttttttgagttttaagtatcgttattatagttttaaattggtacgttatataggcgaattttaaagggagatgtaatttatagaagtatagtagtttaaagggttataaaagtaaggcgtttttaaatagtttagtttttgtttttttgtggtttagggttggagtgtagttttggggtgatttatttgggaatcgggaaggtgttagtttgaattattaagtttaggtaagtttttagaataggagagagtgtttttagtaaggaaaataattttttattttaaataattaggaaagaattttagggatgtggagtttggttatgggaatagaaaggaattattttaagtgtttattaggtcgtttttatttttattgagttagagaatggttttgaaaataggatagatgttaatttttttttcgaaagttaggttgattttgattataatataaattggtttttagagtttatatagggagattttaggggtttttgttattgtgtaatttattttgtagataataattaagaatcggacgtgaaggggaggagtttgtaatttggttaggaatgtataagaaggaataagttaattttgattatgttttttatttatgatattatttaggaattaatgatttttttagaggatttttggaatgattttgttgagggatggaatgtataaagaggaaggaagtgttattttatgttgttatttggaagtaataaaggagattaatagtatgaaaataattaattaaatttgaaaatgaataaagtttttataattttagtttaatatttagagagtttatagtttggatgtataagtaaagagttttttgttggtttttaagataaatttttatataaaatttgggaaaaaggataaaaatgttgtattagggggttttttgtggtttgtttgtaataattataattggtttaattaataattattttttagtatatatattaagggtttttgtagtatttttttttatcgataaataatttttagtttagaaaatgtcgagggatgttttttatttttgtttataaatgtatttttagatgattttataaaaggttttttttttaagtttatagaatattataagattatattaaaggagaagagaggtcggtcgaggtagtttatatttgtaattttagtattttgggaggtcgaagtgggcggattatgaggttaggagatggagattattttggttaaaatagtgaaatttcgtttttattaaaaatataaaaaattagtcgggcgtggtggtatagtttgtagttttagttatttaggaggttgaggtaggagaatcgtttgaatttgggaggtagaggttatagtgagttgagattgtgttattgtattttagtttggatgatatagcgagatttcgttttaaaaataaataaataataaataaataaataaataaaggagaaaaagtaaaaataaagttagtaggatgggagtaaggatttatttttaaaaataaaattaaaaagattttgttatttatttttaaagttttagtaaaaagttttttttttagtttttttaggagagaatttatattaattttttatttagaggaaaatatttagaaatgttggttttgttaaattggttggagacgattgtaaatgattgtaagttgattttatttttaattttattttatttattattagtttatattaagtt

SEQ ID NO: 340 - DNA, 10996 bp, Artificial Sequence
  chemically treated genomic DNA (Homo sapiens)
agtttagtataagttaatagtgaataaaataaaattaaaaatgaaattaatttatagttatttatagtcgtttttaattagtttggtaaagttagtatttttgggtgtttttttttaaatggagagttggtgtaagtttttttttgaaggagttagaaaaaagattttttgttaaggttttggaggtaggtagtagagtttttttagttttatttttaaaaataagtttttgtttttattttattggttttgtttttatttttttttttttatttatttatttatttattatttatttatttttgagacggagtttcgttgtgttatttaggttggaatgtagtggtataattttagtttattgtaatttttgttttttaggtttaagcgatttttttgttttagttttttgagtagttgggattgtaggttgtgttattacgttcggttaattttttgtatttttagtagagacggggttttattgttttagttaggatggtttttattttttgattttatgattcgtttatttcggttttttaaagtgttgggattataggtgtgagttatttcgatcggtttttttttttttttaatgtagttttataatattttataaatttgaaggaggagttttttataaagttatttagaagtgtatttatagataagggtggagaatatttttcggtattttttagattaaggattatttatcgatgggaaaaaatgttataggggtttttagtgtgtatattaaaaaataattattgattgagttaattatagttattgtaaataaattatagaaaattttttaatgtaatatttttgtttttttttttaagttttgtgtgagagtttgttttaaagattagtagagaattttttatttatgtatttaagttgtgagttttttaagtattaggttgggattgtgaaaattttgtttatttttaaatttgattgattgtttttatattgttgattttttttgttgtttttaaatggtagtataaaataatattttttttttttttatatattttattttttaataaaattattttaggaattttttgggagagttattaatttttggatagtgttatggataaagggtatagttagaattagtttatttttttttatatatttttgattaagttgtaaattttttttttttacgttcgatttttgattattatttataaaataggttgtataatggtagagatttttgggatttttttgtataggttttaagggttaatttgtattgtggttaagattagtttgattttcgggaaggaagttggtatttgttttgtttttagagttattttttggtttagtaaaggtaagagcggtttaataggtatttggaatggtttttttttatttttatagttaagttttatatttttaaagtttttttttgattatttggaatggagagttgttttttttgttaggaatatttttttttattttgagggtttgtttggatttagtgatttagattaatattttttcgatttttaagtgagttattttagagttgtattttagttttaggttataaaggggtaaagattgagttgtttaagagcgttttgtttttgtaattttttgaattattatatttttgtggattgtatttttttttgaaattcgtttatatgacgtgttaatttgaagttgtaatggcggtatttaggatttaaaagaaggattaagaaaaagatattaaggttttgaatagattattttaggagttagagttaaagaaagtaattatttattgatttatgggtggtggtagattaaaattttaaagtatagggagttgaagatttattttgagattgagataatgaggtaattagaatagtaatagtattttttatttatttatataattaatattatttttggtttgggttataggtttttagaggtttataattaatatatatgtttaaaaatatttttttaaggatttaggatgagtatgtgttatgagtatgtaaaaaaggatggaagtaaggagagtttgtagtttttaaaataatgatttttatgataaagaataaatatgttttattttatgatttgaattggtttttttttaggagtcgttatgagtttgatttaataaatggttaaggtaggagttaagatggtgatttttttattgtaaaaggaaaaattaaataatgaataataaaataaaaataaaataaattataaaaaaaggggaattgatgtttgattaggtttagatgttgagatttaaaaaatataatttattggattgtaatttttgtatttataagtagttagttgatttttatcgtcgtttgagaggtggtttggataggttaggagtaaatagtttgggtttaaatttcgtttttatttttttttattagtgaattttgggtatgtggatgagtttttgtgtgttttagtttttttttttatttttaatatggggaaattaatagtattttttttatggggttgatgtagagttagggataaaatgtttaggagtgtttgggatataaatagagtttagtattgttatgatttgagtttgtttattaggttttaaatttttttgattttagtatattagatttagatgaattaaggtatgatagcgaagggttaagtgttttgaatagaatgggtttagattgttgttttgtattatttgcgtggttatagataagttatataatttttttgagtttttttatttttttgtttgtgaaatagggttaatagtagtattttttttagagattttttggggtttgcgagataatttatggataggattggcgtttggttgtgaaggtagtagaagttggtttttatcgtgtttttattaattgggtagaatttttgggtttggagtgagtaggggattggtattggttaattaaagtaataggagttttttttttattttttttttaattttttagtttttatgtttttttgtgtatttaattgttatttttgattttttgtattttttttgtttattttttatttttttatttgttttttgttattttttttaattgttaattttggttgttattatagtttttaggaagtattttagaatttttaagaatttaaagattttaaggtttttagatttattttaatagaggaaaatttttgttttttttaagatcgttttttgaaggggtaattgatgaaaataaatagggatggtggtggttgggagggggaagaaacgaaataaaatatttataatttaagatttggtttaatgatatatttgttagttattttattttttttaaaaataatagaaaaaaattaattttaaaaagtaaaatgtatttaaataaaaaaaattagggtttatagtatttataatattaggtattatatattaggattgaaattttgtgtaattgttataaacgttttattaaagttatttatatttaatggtaatatttatagagaaatattgtgtaaattttaaaattttttaaaaataatttttaaatataaatttgttaaagaaaaaaaaaagatggtaagtataaaaaagtttttttatgtttaaagtttaatttgaggtagtttatattatggttaaattttttagttttaagatttagttaaggttgtgaggttgtatttgattatgtatttgaaataagtttataggtgattgtttaggatatttttgttagaaggaatcgttttttttatttttttttacgtataagagtttcgtagttgtttaagtttgtgttttaattgttttcgtcgttttcgtaataagttttttttagaaatgagtttttgtttttttgtttggacggataggatgtatgttgtggtttttttaaggataattattttgggggtttttttattgttttttaatttcgggatttggttacgtagggtaaaaaagtttcgttttagttcgttttttttttggcgttttaagacgttgtgtgttcgttttttgatatttttttcggtgttcgaggatttggggttggtgtattttcggttgttgttgatttgttttaggattttgatattgtttaatttgatttttttggtagtaggatagttttttcgagtggagggaggcgttgcgtagttgtgttgatgtgtggagacgtggtattttttgaggattagtgggttgtgaggaggtttgttgtggtttttagtagaaggtgatttagattttgattttttgttaggagtttgttttttttttatagaaataatatcgattttttttttatttttttgttttttttttttaagaaaggaaatagaaattatttttttagtaaggttatattaaaataattaattattagattaatgttgtataaatataaggtatgaatacgttagaaaggtttttggataaaattatttttttaaagagttatatttaagtttggtgttttggtttatatttgtaattttagtattttgggaggtcgaggtgggcggatcgtgaggttaggagagattattttggttaatacgatgaaattttatttttattaaaattataaaaattagtttggtatggtggtgtgtatttgtagttttagttatttgggaggttgaggtaggagaattttttgaattagggggttggaggttgattgcgttattgtattttagtttagtgatagagtgagatttcgttttaaaaaaggaaaaaaaaaaaaaaagaattaatttagttagttatttttattttttttattatgaaggtaagagttttataaagggaaagatagttgggttatggtatggataagaaaagtgtaattttttaggataggatattgatgttaatttttatttaagatttaatgaggttttggatatatttaaagtaaagtatatttttaagtattttttatttttgagggattttattaagaatattttaggtgttgtaaatgatagttgtaaattgtttggtatgattttagtaattttttattttattggaaatgaaaaataaaaaaaaaaaaattgtagttttgttaaaagtttaagagggcgggggaaggaataaaagaaaaaaaaaagtttaattttggtaaggatttgttttttagtgtttaaaataggttgagaagattttagttttttagtttatttatttttgaggtagtttattggttttcgtatttaggtaggttttgtttagtttttaaatatagttttttatttttgtagatagtttattaaattttattatttttcggaagttaagagggaagtaatttatttatttttagagattaatttttttttatttttatttatatattttttgttatttcgttttagggtaattaaaatgttaacgggaggtaagaagaagtggattgagttgtaagataagttagaaggtttaaaaatttaaatgaaatttttgaggggtgggagataaacggggaggggggttgtaaatatgggtagtttaaggggaagggatgggaggaaacgttaaagtttaaggttttagaggtgatgagtttttaaatttttttagatttgttattttttttttttaataagagtggttcgttaaataagttgttaatgaaaatgggaaaggtatttagtcgtttatttttgataggtttgggcgggtttcgtttattagagtcgttgttggtggtgggcggtgtttttttatggagtattaggggttcggggttgttttgcggggaggatttcgtcgaggagagtagagaattcgaggacggagagaaggcgttggagttttgcgaggcgtaggatttgggcgagttgttgtcgttgagagggtaggggaagattatcgaggggtcgatgtattttgaggcggcggcgtttagattttgtaggtataagttggaggtggagtagacgttgtggtcgcgggcggggttcgggttgtcgttgtttttgcgcgtagtttggtaggaggttagtttttttgagacgagtttggcggcggtcgagaagtcgttttatatatagttttggatgatgatgtttttgatgaaggtttcgtcgttcgggtcgtagatgaaattttggtttattatgtttttttttagtagttcggttattatttttagttggtcggtcgtggagaagttttcgttatcgtcgtcgttgttttttcgaagggagaagggtgtgatcgtaacgtaggagggcgagtagagttcggagcggcggttaggggataggggcggggtgggtagtagttcgaattttttttagatattttcgttgggcgtcgggggttgtagttcgttttgttgttgttgttggtagaagttttttttttcgtcgtagtagaaatacggttgtatcgagtcgtagtcgaggttatagtttttgttggtgaagttaacgttgaggggtatcgtcgcgggaggttgttggagcggggtatataaagcgggaggtagttttgagttaaaggggttttggtgcggaaatttggcgtagcgcgtagtgcgcgttatagtttcgaatttttttttttgtagagttattttttaaagcggttgggtggttttggtgggggaataaagggagtatttttttattttttttggatagttttttgttatttcggagacgtatttagtgaattagcggtttggtgttcgtcgagttttcgttttttcgggagttcggagcgtaaagttcgggagtcggtttcgtagcggtagaggaatcgaaatcggttttggcgtttttaagaagtcgcgggaggtggcggtgaggaaaataatttgttaaaatttaaggtataaagttttgcgttatttgaaggagaaggcgagaggcgtttgggcgttagcggttgcgtgaatttcgtttcgcgtcggggttttttcgttgcggttgtttttattcgcgttttagtcgtttttttattttcgtcggtatcgtagttttttttaattttttttttttatcgttttcgtttttatttttagtatcgttttcgtttaatattttttttgttagttttttttttttttttcgtcggttggagtggcgagtttagtcgcgggttttaatatttttttataaatataaggggggtgttaaataataataggggtattttttttcgtatttaatacggagatgtaattgcgttagagatttcgttgcgatatttttttcggagttattttattaagggtagtagttgttttggaatcgtttagagtttcgtttttcgtagttttttcgtatttcgggcgcgaggatattcgagggcggtcgcggtaggggagttagggttgggtgcggagattcgttttggtttttttaagttaacgattttaggagaatcggatatattttcgtttttttttttttttgtttgcgtttatttaatattacgttttaatatttttagagatttaggttttaaattgtattattgttttttaaaaagttaaatgttaattttttaaaaggattagggcgggttggaatcgtcgcggggataggcgggcgggacgcgtcgtagtgttcgttttcggttgttagaaatgcggtgagtcgaaatttaaatgttttttcggagacggggataagttagcggttgcggagcgatttggtttatataggcgatatgcggtttttattttaaggagtttaggatgtaaggggttttttgtttatcgtaaagtaatttttagttttttaaaatttagagagtaattaatataataaagtaggaatgttcgatcggtcgggagttagcgtgaatatatttataaggtagaaatttcgaaagggtagttttaaaaattattttcgttttttttttgttttttttttttttattttgataagttattttatttcgatttagttttggattattttttattttagttttagttattataattattttgagaaaagtgttaatagcgtaggaatgggagaaaagatattttatttaggtattcgatttattttagtattaaagtgataaaaaaataaattaaaaggtaagtggatttcggtgtttatttggttttttattattcgaaaaaaatttagcgtttaagtagttgtaaggagagttttttagagaagcgggttttggtagcggcggggaagtgtttttaaatgggtagaatagttttttcgcgtcgggagagtcgcgtttttgttcgggtgttgtaagttttagtgtaaagtgttcgttcgttgttatgggtaaagtttcgtggatgcggtaagggttgcggatcgttggttgggggattagcgggagggttgggttagaggcgaagttttttattcgtttcggatttttttttttaggacgttcgtagcgtagttttgttcgttcggtttttttattttagtcggtcgttcgttcgttttttttgtttttcgttggaattattatagcgagttagataaagtttcgaaaatcggtttttatatttagcgcgattttttttttcgttttttttttcgttaagtttttgagaagttttgtttttttcgaggtaggaggggagttagggacggtcggggttcggcggtggcggtcgcgagtagtatagttcgggggtttttagtcgtttagattttcgtattataaagggtcggtgggcggagattagcgagagaggattttttttttttttttttacgttttttgttttgggaattcgggaggggcgtttatggggagggtggggagggtggggaaggtggggaggagatttagtcgggtagtcgagtattttagttttaggatgtaaatagagtaagagagtcgtatgaattaattacgcgcgtttattatttttttttgtttttttttaaattttttttttttttttgttgttttttcgtagtagtattgtttgataaatcgtatttttgttttgtgagtataaattatcgtaggcggaatagttgttttttatatagagaacgtattgcgcgtttatcgttacgttacgcgcgtattaggttgtagggcgtttcgttaaggttggggaaagggtcgcgttttgattaagagttttagggagagtggaggaaagaagggtattaatgggcgcgcgtttagagcgtgggatgttagtgtagatagggaggaatgatagaggtataaggaggaaaacgatgtttagaatgattaaaataatttagtaacgtattgttacgtatatttggagagcgcgttatgaataaatttttattgtatttgttggggggagttatgtattatgtattatgtatgtatagttatttggattggatattttttatttagattgagttttttaatttgttgttaaagtagtagatatcgttttttttgtttcgtttgtttaggttttcgtggggtttcgtgcgggaggcgtttgtttagttttgagatgtgtttgtttgttttagagttgggttagggcgagagggaggttgtttgttttttgttagtttgtattttatcgttttatttttacgttttttatacggagtttttaattttttagttaggttttagaagagataaattttttttgcgttttgtggcgtcggtttgtaatagtttcgggttgtcgggtttgggagaaattaaaggtgttagacgggagaatatgggaggggtagggggtattcgaatcgcgggatcggattttttaaaaggggtaagtggagagtttgtggatcgagtcgggggagttagtagagatttttgtgaaaaaaatcgttaattttttttttttcggataaatcggacgtttaatttttttttaggttttttttttttttttattattggaaatgcggttatgtataaaaaatgtatcgattttgattaaagaagaggagaggagtattattttcgtgtttttttttgggggggggggggagttttgagttaattaaaatttggttgttttttaggtattaattttttagtttattgatttataattttttttgaatattagtgaaagtgtattgtatgtaattcgtaaacgtgtatttatattttatttacgtttcgatttagttagttgtttagttttatatatgatttgtttgttttttgaaatgatttatatttaatatataatgtatattttttcgggattttttattttgtgttattttacggtatgaaaaataaaaaatattttttttatttttggttttttatttaaaggtattttaagtaaatttttttttttttttattatttttaaaagagaaaataattcgggggaaaggggtgtgtgtatagtatgtacgttgtttaagatgggttattattcgttgagtttgtagtttagcgtttaagtgttaagtgaatatagtagtttttaaattcgatgtattgtataatttagttttaaggattgtaaattatttttgtttttaggtttttgtcgtaaacgcggggagtaattaatcgttatgttggattttgttgtaaagcgttttttttttcgttttttttttgggtagtattcgcgtttaggtttgcgaaagtaaagtaagtgtgttttttattggtagtagagattatcgcgtttggatgttaacgagggcgggggttaggtgggggtaggagtaggagcgttcgaggtgtaaggtttttagcgggggaaggataggcggttttttaaaataagtttttagttatttttttgttatttttttaggttggttgtagaaggttcgaagaaagaggagttattggaggaaaaagtggtttagaggtgattatttaatcgtataagagatggtgaaaattaatttattattattgttaatgaatattattttatggagaatcggtaatggtaaacgtgaaataatttataagtatatagacgaaaaaaaaattttaataaattttaaaacggttaaataagtt

SEQ ID NO: 341 - DNA, 1544 bp, Artificial Sequence
  chemically treated genomic DNA (Homo sapiens)
gaattttgttgattaaggtattaaaagtaattaaagagaagtggtgtgaagaaagtaagagagaaataataaattttgtttattttgtaataattgaaaatttttggttgggcgtggtggtttacgtttgtaattttagtattttgagaggtcgaggtaggtggattattttaggttaggtgtttaagattagtttggttaatatggtgaaatttcgtttttattaaaaaaaaataataataataatataaaaattagtcgggggtggtggtaggtatttgtaattttagatattcgggaggttgaggtaggagatttatttgaatttgggaggcggaggttgtaatgagttgagatcgcgttattgtattttagtttggatgatagagtaggattttattttaaaaagaaaggaaaagaaaagaaaaaatattaaatgtgtacgttttttgatttagttgtattattttaaggagttgatattattaaaattgtttaagtgtttaaaggtgtttgtagttaaataataggagattgataaattatgttatatatatgtgatgttatgttttaaagaggtattgatatgataaaagatgtacgtggtataaaattaaatgtattttattaagtatttttttaagtgtttacggaatgagtgtatttttgaaaaaaaaaaagtgtattcgaatttttaaaaaagttttaaaagttttatataatgaacgattgagtgattataagagttggcgggggaatgttaagaggatgatagggagttaagtttaatagaataatttatttttttattttgtgatatttacgagcgtattaattttgtaattgaaaaataaagtgtatatttgtagtagttgtattttttttaggttgtaaggaggttttttttttcggtaggtttgatttgtattttatttttattttcgtggttggaaattttttatttacgtagtgggaggttgaggagttattataaagttggggtttgacgagtcgggatcgggattcgatttttatatatgttcggatttgttttgcggtcgggtttaggagttaaagaggcggggagatttgcgcgacgttgtttcgttttgcgttcgttttttttaatgtatgttttagggggcgggtttcgcggggagtatggatacgattggttttaaagtttttttcgtaaggtcgtgggttggatagcgtggtgacgtcgtaacgcggcgtagggtgagagcgcgcgtttgcggacgcggcggtattaaacggttgtaggcgtagtagagtggtcgttgtttttttaggttttagtcggtcgtcgcgacgttcgttcgttcgttttgaggtttttgaagtcgaaattagttagatttttttttttttcgtttgtttgtagcggcgttgttgttatttcgttattatgttcgaggcgcgtttggtttagggttttatttttaagaaaggtgttggaggtatttaaggattttattaacgaggtttgttgggatattagttttagcggtgtaaatttgtag

SEQ ID NO: 342 - DNA, 1544 bp, Artificial Sequence
  chemically treated genomic DNA (Homo sapiens)
ttgtaggtttatatcgttggagttaatattttagtaggtttcgttgatgaggtttttgagtgtttttaatattttttttgaggatggagttttggattaggcgcgtttcgaatatggtggcggagtggtaataacgtcgttataggtaggcgggaaggaggaaagtttagttggtttcggttttaggagttttagagcgagcgggcgaacgtcgcgacgatcggttgagatttagaaagataacgattattttgttacgtttgtaatcgtttaatgtcgtcgcgttcgtaagcgcgcgtttttattttgcgtcgcgttgcgacgttattacgttgtttagtttacggttttgcggggaagattttagggttaatcgtgtttatgtttttcgcgaggttcgttttttagagtatatattggaggaagcgggcgtagggcggggtagcgtcgcgtaggttttttcgtttttttgatttttgaattcggtcgtagaataagttcgggtatatgtggagatcgggtttcggtttcggttcgttaagttttagttttatggtggttttttagttttttattacgtgggtagaaagtttttagttacgaaagtgaaagtgaaatgtaaattaagtttatcgggaggaaaagtttttttgtagtttgaagagagtatagttgttgtaaatatgtattttattttttaattatagaattgatgcgttcgtaggtgttataagataaagaggtgaattgttttgttaaatttagttttttattatttttttaatattttttcgttagtttttataattatttaatcgtttattgtataaagtttttaaagtttttttaaaagttcgaatatatttttttttttttaaaaatgtatttatttcgtaaatatttggaaaagtatttaataaagtatatttaattttatgttacgtatattttttattatattagtatttttttaaaatatagtattatatgtatataatataatttattaattttttgttgtttaattataaatatttttgagtatttaggtaattttggtgatattaattttttgaagtaatatagttgagttaaagagcgtatatatttaatatttttttttttttttttttttttttttgagatggagttttgttttgttatttaggttggagtatagtggcgcgattttagtttattgtaattttcgttttttaggtttaagtgagttttttgttttagtttttcgagtatttgggattataggtgtttattattattttcggttaatttttgtattattattattatttttttttagtagagacggggttttattatgttggttaggttggttttgaatatttgatttgaggtgatttatttgtttcggttttttaaagtgttgggattataggcgtgagttattacgtttagttagaaatttttaattgttataggatggataggatttgttgttttttttttgttttttttatattatttttttttagttatttttaatattttggttagtagaattt

SEQ ID NO: 343 - DNA, 641 bp, Artificial Sequence
  chemically treated genomic DNA (Homo sapiens)
aaataaaaaagtaggtatggttgattttcgttagcgggaacgatttggttttagacgttattagtatttttttatttttagtttaacgttttttgtttttaatagtttagttatagggggtcgggttatgggttagtttcgttttcgtttatgttttttatttaatatttgagagaatcggaaggaggtagagttatatcgaggattaaatttcgtttttcgtttttttttagttaatcgttgttagcggggtgtggatttcgtcgttgattttattttcgtcgttttgggtaatttagagtcgcgcgtcgggcgggaatgtaagatggcggagtagtaacgtaaagcgtttggtattgagtttgtggtcgatttcggtttcggtttttgtagtagtcgtgatcgtttagtggagtgtttagggtagttggttaggatgtcgaatattaaaatttttagcggtagtttttattaggatttattttagaaaattgttgatcgtttgggtttggagttaggtaaggtggtgattaagaaatttagtaattaggagatttggtaaggattaagttgggattttgattagattttatttgtttaggcggtagagtataggagggatggggtcgtcgtttgagttt

SEQ ID NO: 344 - DNA, 641 bp, Artificial Sequence
  chemically treated genomic DNA (Homo sapiens)
gagtttaagcggcgattttattttttttatattttgtcgtttgggtaggtgaggtttagttagggttttaatttggtttttattaggttttttggttgttgaattttttagttattattttgtttagttttaggtttaggcggttagtaattttttgagataagttttggtgggagttgtcgttgaagattttgatattcggtattttggttaattattttaagtattttattaagcgattacggttgttgtagagatcggaatcgaagtcggttatagatttaatattaagcgttttgcgttgttatttcgttattttatattttcgttcggcgcgcggttttaaattatttaaagcggcggaggtggggttagcggcgaagtttatatttcgttggtaacgattagttaagagggagcgaagggcggggtttggttttcggtgtagttttgttttttttcgatttttttaggtattgggtgaagagtatgaacgggggcgagattaatttatagttcggttttttgtagttaggttgttggggataggagacgttggattgggggtggagggatgttggtgacgtttgaggttagatcgttttcgttagcggaaattaattatgtttgtttttttattt

SEQ ID NO: 345 - DNA, 6210 bp, Artificial Sequence
  chemically treated genomic DNA (Homo sapiens)
gtaggaatagtgttagtattgttcgagttcgagggttggaggttaggggatgaaggtttgtttttacgttttgtattgaattagggttagaattggggatgggggtaggggcgtattttttcgggagtcgaggtttaagttttcggggttttgtattcgatgtcgttttttttatttttgagttttagaattgtttttagttttcgtataagggtaaaaaggcgttttttgttttatttttttcgatttcgggaataagggttcgtattgaattaggtgcgaatgtttttttttattttgcgtcgttttcgtttttttttttttagtcgcggttttcgttttttttcgtattgtattttcggtgttggttgtagttcgcgagtagttttcgttaatttttttttttttatataggatgtttatattaggatatttgcgttagtaggtttttacggtttttttttgtagttttggggggagttattttcgaaattttttattttggggggtttacgagatttttgagataggaattgcgaaatgtttacgagattaggatacgcgttaaggcgggggtagggagttgcgagcgttggggacgtagtcgggcggtcgtagaagcgtttaggttcgcgcgttatttttttggcgttatcgtggttgagttcgtgacgtttatatttatttataaaacgtttgttataaaagtagtggttgcggcgtttcgtattttaatcgtatttgtagcgagtaattgagaagttaagattgagtcggcggtcgcggcgtagcgaacgagtagtgatcgtgtttttatttagttttgttttatagcgtttatttgttttcgtttttcggtttttcgttcggttttgtttaatcgttacgatgatgttttcgggttttaacgtagattacgaggcgttattttttcgttgtagtagcgcgttttcggtcggggatagttttttttattattatttattcgtagattttttttttagtatgggttcgtttgttaacgcgtaggtaaggttggtttttcgtcgtcgcggggtcgggggtttggggtcgcggaggaggagatatcgggcgggacgttttagtagatgagtagggggtttttttgtgtttggagggaggttgtcgtggtcggagcggtgtcggttcgggggttcgggatttgttttgagcgtacgtacgtttgttatagtaagaattggtttttttttcgggaggtaggttcgttttgagtaatttttggtttgtattttaggacggatttttgatattagttggagtagacgtgttttaagtataaattcgttaattagagtttggttttttcggggaggtggtagaaagcggtaattttttttttttcggtagtttggagtacggaggagggatgagggaggagggtgtagcgggcgggtgtgtaaggtagttttattgataaaaagcgagtttattttggagatttcggagcggcgtttgcgttagcgtagacgttagggatatttataataaatttttttttaagtaagtgatgttgaagggataacgggaacgtagcggtaggatggaagagataggtattgcgttgcggaatgtttgggaggaaaagggggagattttttatttaggatgagggatatttaagatgaaatgttcgtggtaggatcgtttttttttattgttgtatgcggtattgggaattcgttttatttgtgttcggaatttgttcgtttacgtcggttttttttttttgttttgttttaggatttttgtacggatttggtcgtttttagtgttaattttatttttacggttattgttatttcgattagttcggatttgtagtggttggtgtagttcgttttcgttttttttgtggttttatcgtagattagagttttttattttttcggagttttcgtttttttcgttggggtttattttagggttggcgttgtgaagattatgataggaggtcgagcgtagagtattggtaggaggggtaaggtggaataggtgaggaattttagcgtattttttttgggaatgtgggggttgggtgggaagtagtttcggagatgtaggagtttagtatagaggatgaagttattgatggggttggttgtatattcgtaattgggagttttggttttaagtttattttattttaatttagattttgagttttattttaagaagtatttttatagttttttttttaagttttttatcgtatgtttttagattgggtttttttttgtttttttgttgaggattttattttaaatgtaagttatatttattttgtaattgtaggttagaaatggttttatagtggggtgttaggaagtagggaagttgtaggagttagttttattggggtgggtgaatggaggtgatggtagatatttttattgaatgtcggtttttttttgtgattattttagttatttttagaagaagaagagaaaaggagaattcgaagggaaaggaataagatggttgtagttaaatgtcgtaatcggaggagggagttgattgatatattttaagcggtaggtattttgtgggttgtttttttttaaaatttaagggaaagttggagattgagtataagggtttttgagtaagattgtgttttatgtttttttttatttttttgtatataggagatagattaattagaagatgagaagtttgttttgtagatcgagattgttaatttgttgaaggagaaggaaaaattagagtttattttggtagtttatcgatttgtttgtaagatttttgatgatttgggttttttagaagagatgtttgtggttttttttgatttgattgggggtttgttagaggttgttatttcggagtttgaggaggtttttattttgtttttttttaatgattttgagtttaagtttttagtggaatttgttaagagtattagtagtatggagttgaagatcgagttttttgatgattttttgtttttagtattatttaggtttagtggttttgagatagttcgtttcgtgttagatatggatttatttgggtttttttatgtagtagattgggagtttttgtatagtggttttttggggatggggtttatggttatagagttggagtttttgtgtatttcggtggttatttgtatttttagttgtattgtttatacgttttttttcgtttttatttatttcgaggttgattttttttttagttgtgtagttgtttatcgtaagggtagtagtagtaatgagtttttttttgattcgtttagtttatttacgttgttggttttgtgagggggtagggaaggggaggtagtcggtatttataagtgttattgttcgagttggtgtattatagagaggagaaatatattttttttagagggtttttgtagatttagggaggattttatttgtgcgtgaaatatattaggttgtgggttttaaggatttgaaagtatttatgtgtggatttaagtttttatttttttcggagatgtagtaaaacgtatggagtgtgtattgtttttagtgatattttagagagttggtagttagtagtatgttgagttaggtttgggtttgtgttttttttttttttttttttagtttttttatagtattaattaatttattgggtttattattggaattaatttggtgttggatatttttaaattgtatttagtgtagttgattttaataataattattgtgtttttggtaatagtgtgttttgattagaaatgattaatattatattaagaaaagatacgattttattttttggtagatagaaataaatagttatatttatgtattgtagtttttttttaatattaatgtttattgtaatgttattgattatgtattgttgaggtggtttgaatgttttgatattaatagttttttatgaaaacgttttattgtgtttttaatttatttattaagatggatttttagatatttatatttttattttatttttttttattttgaggttttttgatatgtggaaagtgaatttgaatgaaaaatttaagtattgtttgtttattgttttaagatattgttaataaaagtatttaagttgaatgcgattaattttgtgttttttttattttggaagttttgtaagtttttgaaaggtattattggagattagtttgttaagaagggtagttgttggagggggatatattttttgtttgattttttattaaagaggataaggaaattatagagttgattttagaatattttataaatatatgttttttattggaatgttaagattttttattgtttttggggacgggaaatcgttgtgtaatagtttttgtgggaatatattttttttgttttagtattcgtagggggaaatatttaaattttgttgtgttaatattaaatttagatgttttgattttaaaggaattttttaagtaaatagaatttagttttgtatagattattttaattttttatttttataaaattacgtggagggttattttattttaaagatgagtaaattgaagaatggttagaataaataatttttttgatatttcgttatcggtattagaatttttttgttcgttatcgtatttagtaggttgaattgttttttgatatttggttaaaaaaaatttttaggtcgggcgcggtggtttatgtttgtaattttagtattttgggaggtcgaggtaggcggattatttgaggtcgggagttcgagattagtttgattaatatggagaaatttcgtttttattaaaaatataaaattagtttggtgtggtggtgtatgtttgtaattttagttatttgagaggttgagataggaaaattatttgaattcgggaggcggatgttgtagcgaattgagattgcgttattgtattttagtttgggtaataagattgaaattttgtttaaaaaaaaaagtttttattaatgtgtatatttttttgtatttttttattttcgaaagggaaggagggttattgttttattttttattaataaatgtattgtggtttttggtttttttaatattatatgttttttatttagtttatagtgggcggaagtgggggagaaaaagttgtttagaaattaaaagatattttaaatagtataaataatggttgatcgttttgtaaataaaaagttatataatagtttaagaaggagaagttaatatgattttgaataagttttaatttagaaattttattattttaaggaagaacgtgatttttgtttaggacgtttttggtaatggggtatttatatatatatgtatacgtataaattatagggaaaggagatcgtttttttgtttttgttcgcgagtattacgtaggtattatgtattatgtttttatatatattgggtggaagaagagttttagcgttagttttttaatgttttggtgataatgaaaattattgggtgtttatggggtgttatatttaatcgagttaaaagttttaatttaaaatgatagttttattgaggttgatgttttcgtttatgatatttttgttttttttataaaaatggatatttaaaagtaatttatcgttttttagattatttttatattatatattatttggggtgttgtttttgttagatttgtgatgatagtggttttaggatttttgtttgttgtttaaagggtaaatattttatagtttttaaatatatttaaattaaatatagaattaatataattaataaatatttggtttgaaataataaggtgatttattttggaaggaatttagttggtgggttaggagcggtggtttatatttgtaattttagtattttgggaggttgagataggaggattattggagtttaggagtttgagattagtttgggtaatatggtaaaatttagtgtgtttttgttgttttagttatattatttaggaggttgaggtaggagtatgatttgagtttgggagggggaggttgtagagaattgatattgtattattattgtattttagtttgggtgatatagtaaaattttattttaaaaaaaaaaaaaaaaaaaaggaatttagttggtttttgtaggtgtgtaataataataattagaggaagaaaaggaagacgattttttagatgaagaagggtagttggattttcggat

SEQ ID NO: 346 - DNA, 6210 bp, Artificial Sequence
  chemically treated genomic DNA (Homo sapiens)
gttcgaaggtttagttgtttttttttatttgggaaatcgttttttttttttttttttggttgttattattgtatatttataggaattagttgggttttttttttttttttttttttttgagatagggttttgttgtgttatttaggttggagtgtagtggtggtgtaatattagttttttgtaattttttttttttaggtttaagttatatttttgttttagttttttgagtagtgtagttgggataatagaagtatattgggttttgttatgttgtttaggttggttttaaatttttggattttagtgatttttttgttttagttttttaaagtgttggaattataggtgtgagttatcgtttttggtttattagttgggttttttttagggtagattattttgttattttagattaggtgtttgttagttatattaattttgtatttagtttaggtatatttaaaggttataaaatatttgttttttgaatagtaaatagggattttaaggttattgttattataagtttagtagaaatagtattttaagtggtgtgtgatataggagtgatttaaagagcggtaagttgtttttaaatgtttatttttatgggaggggtagagatattatagacgagaatattaattttagtaaaattgttattttgaattaaaatttttaattcgattgaatatgatattttataagtatttagtgatttttattattattaaagtattagaagattggcgttgaagttttttttttatttagtgtgtgtgaaaatatagtgtatggtgtttgcgtgatattcgcgagtagaggtagaagggcggttttttttttttgtggtttgtacgtgtgtatgtgtgtgtaagtgttttattattagagacgttttggataaaggttacgtttttttttaagatgataaagtttttaagttaaagtttgtttagagttatgttgattttttttttttgagttattatgtaattttttgtttgtagaacgattagttattatttgtgttgtttgagatattttttgatttttgagtaatttttttttttttattttcgtttattataaattgaatgaagggtatatggtattagagaaattagaaattataatgtatttattaataagggatagggtaatagttttttttttttttcgagaataaaagagtataaaaaaatgtatatattagtgaaaatttttttttttaaatagagttttaattttgttgtttaggttggagtgtaatggcgtaattttagttcgttgtaatattcgtttttcgagtttaagtgatttttttgttttagttttttaagtagttaggattataggtatgtattattatattaggttaattttgtatttttagtaaagacggggtttttttatgttggttaggttggtttcgaattttcgattttaggtgattcgtttgtttcggttttttaaagtgttaggattataggtatgggttatcgcgttcggtttgaaaattttttttaattaagtattaagaggtagtttagtttgttggatacgataacgagtaggaagattttaatgtcgataacggaatattaagaaagttgtttattttaattattttttaatttgtttatttttgaagtagaataattttttacgtgattttgtgagaataaaaagttaaaatagtttgtataaagttaggttttgtttgtttaaagggtttttttaagattaaaatatttgaatttaatattagtataataaaatttaaatatttttttttgcgagtattgaaatagaaaaaatgtatttttataaaagttgttatatagcggtttttcgtttttagaagtagtagaaaattttagtattttaatggaaggtatgtatttgtaaaatattttaaaattagttttatagtttttttgttttttttgataagggattagatagagggtgtgtttttttttagtagttattttttttgataaattggtttttaataatattttttagaaatttataagatttttagaatgaaaagagtataaggttggtcgtatttaatttaaatgtttttattgataatgttttggaataataagtaaataatgtttaaattttttatttaaatttattttttatatgttaaaagattttaaggtagaaaaaaataaaataaaaatataaatatttgagaatttattttaataaataaattaaaaatataataaaacgtttttatggaaaattgttaatgttagaatatttagattattttaataatgtatgattagtaatattataatgaatattgatgttgaagaaaaattatagtatatggatatagttatttatttttatttattagaaaataaagtcgtatttttttttagtataatattggttatttttaattagaatatattattgttaggaatatagtagttattgttaaaattagttgtattagatataatttgaaaatatttagtattaggttaattttaataatgaatttaatagattagttaatgttatgagaagattaaggagaaagagaaaagagatatagatttaggtttggtttaatatgttattaattattagttttttgaagtgttattgggaataatatatattttatgcgttttgttatattttcggaagaggtaaggatttgagtttatatatggatgtttttaagtttttgaggtttatagtttggtgtgttttacgtatagataaggttttttttaggtttataggaattttttagggaagatgtgttttttttttttgtaatgtattagttcgggtagtggtatttgtgggtgtcggttgtttttttttttttgtttttttatagggttagtagcgtgggtgagttgagcgagttagaggaaggtttattgttgttgttgtttttgcggtgggtagttgtatagttggggaaggagttagtttcggggtaggtgaagacgaaggaagacgtgtaagtagtgtagttgggagtataggtgattatcggagtgtataggggttttagttttgtggttatgggttttatttttagggagttattgtgtagaggtttttagtttgttgtatagaaggatttagataggtttatgtttggtacggagcgggttgttttagagttattgggtttggatgatgttgggaataggaagttattaaagggttcggtttttagttttatgttgttgatgtttttgataggttttattgagggtttgggtttagggttattgaggagaggtagggtgaaggtttttttagatttcggggtggtaatttttggtaggtttttagttagattaagggaagttatagatattttttttgggaagtttaggttattagggattttgtaggtaggtcggtgagttgttaggatgaattttagttttttttttttttttagtaggttggtaatttcggtttgtaaagtagattttttattttttagttggtttgttttttgtatatagagggataaaggaaagtataagatatagttttatttaagggtttttatgtttaatttttaatttttttttaagttttaaaaaggagtaatttatagagtatttatcgtttggagtgtattagttagttttttttttcggttgcggtatttggttgtagttattttattttttttttttcggatttttttttttttttttttttttggagataattagaataattataaaaaaagatcgatatttagtaaaagtgtttgttattatttttatttatttattttagtagaattggtttttgtagtttttttgttttttggtattttattgtgaaattatttttgatttgtagttgtagaataggtgtgatttgtatttaaaataagatttttagtaagagaataaagaagagtttagtttgaaagtatgcggtaagaaatttagggaagaaattatgagagtattttttagggtgagatttagagtttgagttgggatggaatgggtttggagttagggtttttagttacggatgtgtagttagttttattagtggttttattttttgtattgggtttttgtattttcggggttgttttttatttagtttttatatttttaggaagagtacgttagagttttttatttgttttattttgttttttttgttaatgttttgcgttcggttttttgttatggtttttataacgttagttttggagtaagttttagcggagggggcggggatttcgaaagggtgaggggttttggtttgcgatggggttatagaggagacgagggcgggttgtattagttattgtaggttcggattggtcgagatggtagtgatcgtgggaatgaagttggtattggagacggttaggttcgtgtagaagttttagaataaaatagaaggggaaagtcgacgtgagcgagtaggtttcggatataggtggggcgagtttttagtgtcgtatgtagtagtgaagagaaacgattttgttacggatattttattttaaatgttttttattttggatgaaaggttttttttttttttttttaggtatttcgtagcgtagtgtttgttttttttattttgtcgttgcgttttcgttatttttttagtattatttgtttgaaagggggtttgttataaatatttttgacgtttgcgttgacgtaggcgtcgtttcggagtttttagaatgaattcgttttttattaatgaaattgttttatatattcgttcgttgtattttttttttttatttttttttcgtgttttaggttgtcgggggaggggggattgtcgttttttgttattttttcgaagaagttaggttttagttagcgagtttgtgtttgggatacgtttgttttagttaatgttagagattcgttttggagtgtagattagaggttgtttagaacgaatttgtttttcgaagggggaattaatttttattatggtaagcgtgcgtgcgtttagagtaagtttcgagttttcgagtcggtatcgtttcggttacggtagtttttttttaggtataagggagttttttatttatttattggagcgtttcgttcggtgttttttttttcgcgattttaagttttcggtttcgcggcgacgggaagttagttttatttgcgcgttgataggcgagtttatgttggagaaggagtttgcgggtgagtggtagtaagagaggttattttcggtcggggacgcgttgttgtagcgggaggatgacgtttcgtagtttgcgttgaagttcgagaatattatcgtggcggttaggtaaagtcgggcgaggggtcgaggggcggagataggtgggcgttgtgaagtagagttgggtaggagtacggttattgttcgttcgttgcgtcgcggtcgtcggtttagttttggttttttagttgttcgttgtagatgcggttggagtacgaggcgtcgtagttattgtttttataataagcgttttatgaatgagtgtaaacgttacgggtttaattacggtggcgttagaggggtggcgcgcgggtttgggcgtttttgcggtcgttcggttgcgtttttagcgttcgtagttttttgttttcgttttggcgcgtgttttaatttcgtgagtatttcgtagtttttgttttagaggtttcgtgggttttttaagatgaggggtttcggggatggttttttttagggttatagggaaaggtcgtggaaatttgttgacgtagatgttttaatatggatattttgtgtaaggggggagggattgacgggaattgttcgcgggttgtagttaatatcgagggtgtagtgcggggggaggcgggggtcgcggttgggggaggggaggcgggaacggcgtagaatgagagagaatattcgtatttggtttaatgcggatttttgttttcgaggtcgggggggatggggtagagagcgtttttttatttttgtacggaaattgaagatagttttgaggtttagagataggagaaacggtatcgagtataggatttcgaggatttaagtttcggttttcgaaggaatgcgtttttatttttatttttaattttagttttaatttagtgtaaagcgtggaagtagatttttattttttaatttttagttttcgggttcgagtaatattagtattgtttttgt

SEQ ID NO: 347 - DNA, 20 bp, Artificial Sequence
  c-fos primer
ttttgagttttagaattgtt

SEQ ID NO: 348 - DNA, 20 bp, Artificial Sequence
  c-fos primer
aaaaaccccctactcatcta

SEQ ID NO: 349 - DNA, 18 bp, Artificial Sequence
  c-fos detection oligo
aaaacattcgcacctaat

SEQ ID NO: 350 - DNA, 18 bp, Artificial Sequence
  c-fos detection oligo
aaaacattcacacctaat

1. A nucleic acid comprising a sequence at least 18 bases in length of a segment of the chemically pretreated DNA of genes associated with DNA transcription according to one of the sequences taken from the group of Seq. ID No.1 to Seq. ID No.346 and sequences complementary thereto.

2. A nucleic acid comprising a sequence at least 18 base pairs in length of a segment of the chemically pretreated DNA of genes associated with DNA transcription according to a sequence according to one of the genes ELF1 (M82882), ETV3 (L16464), ETV4 (D12765), TAF2C2 (Y09321), TCF9 (M29204), ZNF121 (M99593), ZNF131 (U09410), ZNF139 (U09848), ZNF154 (U20648), ZNF169 (U28322), ZNF2 (X60152), ZNF204 (AF033199), ZNF206 (AA206569), ZNF3 (X78926), ZNF37A (X69115), ZNF44 (X16281), ZNF8 (M29581), ZK1 (NM_{—}005815), ADA (NM_{—}000022), ATBF1 ((NM_{—}006885), ATF3 (NM_{—}001674), ZNF255 (NM_{—}005774), CBFB(NM_{—}001755), CEBPD (NM_{—}005195), CTPS (NM_{—}001905), DCTD (NM_{—}001921), DR1 (NM_{—}001938), ELF3 (NM_{—}004433), ELK4 (NM_{—}021795), ETV5 (NM_{—}004454), KLF4 (NM_{—}004235), FOXO1A (NM_{—}002015), FLI1 (NM_{—}002017), HHEX (NM_{—}001529), HIVEP1 (NM_{—}002114), HMG2 (NM_{—}002129), ID1 (NM_{—}002165), ID3 (NM_{—}002167), LAF4 (NM_{—}002285), ZNFN1A1 (NM_{—}006060), LYL1 (NM_{—}005583), MAFG (NM_{—}002359), MAZ (NM_{—}002383), ODC1 (NM_{—}002539), PBX3 (NM_{—}006195), POU2AF1 (NM_{—}006235), POU2F2 (NM_{—}002698), POU3F1 (NM_{—}002699), PROP1 (NM_{—}006261), RARG (NM_{—}000966), RECQL (NM_{—}002907), RXRA (NM_{—}002957), SP100 (NM_{—}003113), ZFP93 (NM_{—}004234), MKRN3 (NM_{—}005664), ZNF133 (NM_{—}003434), ZNF157 (NM_{—}003446), ZNF173 (NM_{—}003449), ZNF189 (NM_{—}003452), ZNF207 (NM_{—}003457), ZNF262 (NM_{—}005095), ZNF264 (NM_{—}003417), ZNF74 (NM_{—}003426), ZNF91 (NM_{—}003430), POU3F2 (NM_{—}005604), ZNF84 (NM_{—}003428), ERV3, TCF8 and sequences complementary thereto.

3. An oligomer, in particular an oligonucleotide or peptide nucleic acid (PNA)-oligomer, said oligomer comprising in each case at least one base sequence having a length of at least 9 nucleotides which hybridizes to or is identical to a chemically pretreated DNA of genes associated with DNA transcription according to one of the Seq ID Nos 1 to 346 according to claim 1 or to a chemically pretreated DNA of genes according to claim 2 and sequences complementary thereto.

4. The oligomer as recited in claim 3; wherein the base sequence includes at least one CpG dinucleotide.

5. The oligomer as recited in claim 3; characterized in that the cytosine of the CpG dinucleotide is located approximately in the middle third of the oligomer.

6. A set of oligomers, comprising at least two oligomers according to any of claims 3 to 5.

7. A set of oligomers as recited in claim 6, comprising oligomers for detecting the methylation state of all CpG dinucleotides within one of the sequences according to Seq. ID Nos. 1 through 346 according to claim 1 or a chemically pretreated DNA of genes according to claim 2, and sequences complementary thereto.

8. A set of at least two oligonucleotides as recited in claim 3, which can be used as primer oligonucleotides for the amplification of DNA sequences of one of Seq. ID No. 1 through Seq. ID No. 346 and sequences complementary thereto and/or sequences of a chemically pretreated DNA of genes according to claim 2, and sequences complementary thereto and segments thereof.

9. A set of oligonucleotides as recited in claim 8, characterized in that at least one oligonucleotide is bound to a solid phase.

10. Use of a set of oligomer probes comprising at least ten of the oligomers according to any of claims 6 through 9 for detecting the cytosine methylation state and/or single nucleotide polymorphisms (SNPs) in a chemically pretreated genomic DNA according to claim 1 or a chemically pretreated DNA of genes according to claim 2.

11. A method for manufacturing an arrangement of different oligomers (array) fixed to a carrier material for analyzing diseases associated with the methylation state of the CpG dinucleotides of one of the Seq. ID No. 1 through Seq. ID No. 346 and sequences complementary thereto and/or chemically pretreated DNA of genes according to claim 2, wherein at least one oligomer according to any of the claims 3 through 5 is coupled to a solid phase.

12. An arrangement of different oligomers (array) obtainable according to claim 11.

13. An array of different oligonucleotide- and/or PNA-oligomer sequences as recited in claim 12, characterized in that these are arranged on a plane solid phase in the form of a rectangular or hexagonal lattice.

14. The array as recited in any of the claims 12 or 13, characterized in that the solid phase surface is composed of silicon, glass, polystyrene, aluminium, steel, iron, copper, nickel, silver, or gold.

15. A DNA- and/or PNA-array for analyzing diseases associated with the methylation state of genes, comprising at least one nucleic acid according to one of the preceeding claims.

16. A method for ascertaining genetic and/or epigenetic parameters for the diagnosis and/or therapy of existing diseases or the predisposition to specific diseases by analyzing cytosine methylations, characterized in that the following steps are carried out:
a) in a genomic DNA sample, cytosine bases which are unmethylated at the 5-position are converted, by chemical treatment, to uracil or another base which is dissimilar to cytosine in terms of hybridization behavior;
b) fragments of the chemically pretreated genomic DNA are amplified using sets of primer oligonucleotides according to claim 8 or 9 and a polymerase, the amplificates carrying a detectable label;
c) Amplificates are hybridized to a set of oligonucleotides and/or PNA probes according to the claims 6 and 7, or else to an array according to one of the claims 12 through 15;
d) the hybridized amplificates are subsequently detected.

17. The method as recited in claim 16, characterized in that the chemical treatment is carried out by means of a solution of a bisulfite, hydrogen sulfite or disulfite.

18. The method as recited in one of the claims 16 or 17, characterized in that more than ten different fragments having a length of 100-2000 base pairs are amplified.

19. The method as recited in one of the claims 16 through 18, characterized in that the amplification of several DNA segments is carried out in one reaction vessel.

20. The method as recited in one of the claims 16 through 19, characterized in that the polymerase is a heat-resistant DNA polymerase.

21. The method as recited in claim 20, characterized in that the amplification is carried out by means of the polymerase chain reaction (PCR).

22. The method as recited in one of the claims 16 through 21, characterized in that the labels of the amplificates are fluorescence labels.

23. The method as recited in one of the claims 16 through 21, characterized in that the labels of the amplificates are radionuclides.

24. The method as recited in one of the claims 16 through 21, characterized in that the labels of the amplificates are detachable molecule fragments having a typical mass which are detected in a mass spectrometer.

25. The method as recited in one of the claims 16 through 21, characterized in that the amplificates or fragments of the amplificates are detected in the mass spectrometer.

26. The method as recited in one of the claims 24 and/or 25, characterized in that the produced fragments have a single positive or negative net charge for better detectability in the mass spectrometer.

27. The method as recited in one of the claims 24 through 26, characterized in that detection is carried out and visualized by means of matrix assisted laser desorption/ionization mass spectrometry (MALDI) or using electron spray mass spectrometry (ESI).

28. The method as recited in one of the claims 16 through 27, characterized in that the genomic DNA is obtained from cells or cellular components which contain DNA, sources of DNA comprising, for example, cell lines, biopsies, blood, sputum, stool, urine, cerebral-spinal fluid, tissue embedded in paraffin such as tissue from eyes, intestine, kidney, brain, heart, prostate, lung, breast or liver, histologic object slides, and all possible combinations thereof.

29. A kit comprising a bisulfite (=disulfite, hydrogen sulfite) reagent as well as oligonucleotides and/or PNA-oligomers according to one of the claims 3 through 5.

30. The use of a nucleic acid according to claims 1 or 2, of an oligonucleotide or PNA-oligomer according to one of the claims 3 through 5, of a kit according to claim 29, of an array according to one of the claims 12 through 15, of a set of oligonucleotides according to one of claims 6 through 9 for the diagnosis of Adenosine deaminase deficiency, Viral infection, Retroviral infection, Sezary syndrome, Hematological disorders, Immunological disorders, Werner syndrome, Tuberculosis, Developmental disorders, Psoriasis, Rieger syndrome, Neurological disorders, Neurodegenerative disorders, Waardenburg syndrome, Niemann-Pick disease, Myelodysplastic syndrome, Myocardial infarction, Hypertension, Angiogenesis, Erythropoiesis, Congenital heart disease, HDR syndrome, Myelodysplastic syndrome, Arthiritis, Polyglutamine disorders, solid tumors and cancer.

31. The use of a nucleic acid according to claims 1 or 2, of an oligonucleotide or PNA-oligomer according to one of claims 3 through 5, of a kit according to claim 29, of an array according to one of the claims 12 through 15, of a set of oligonucleotides according to one of claims 6 through 9 for the therapy of Adenosine deaminase deficiency, Viral infection, Retroviral infection, Sezary syndrome, Hematological disorders, Immunological disorders, Werner syndrome, Tuberculosis, Developmental disorders, Psoriasis, Rieger syndrome, Neurological disorders, Neurodegenerative disorders, Waardenburg syndrome, Niemann-Pick disease, Myelodysplastic syndrome, Myocardial infarction, Hypertension, Angiogenesis, Erythropoiesis, Congenital heart disease, HDR syndrome, Myelodysplastic syndrome, Arthiritis, Polyglutamine disorders, solid tumors and cancer.

32. A kit, comprising a bisulfite (=disulfite, hydrogen sulfite) reagent as well as oligonucleotides and/or PNA-oligomers according to one of claims 3 through 5.
